United States Patent Application Publication US 2024/0175014 A1 - sequence listing, part 4

SEQ ID NO: 67715 - DNA, 22 bp, synthetic construct
  misc_feature 1..22: note = chemically synthesized
  source 1..22: mol_type = other DNA
aatcctcagcttacggacctgg

SEQ ID NO: 67716 - DNA, 22 bp, synthetic construct
  misc_feature 1..22: note = chemically synthesized
  source 1..22: mol_type = other DNA
agcttacggacctgggcccatc

SEQ ID NO: 67717 - DNA, 22 bp, synthetic construct
  misc_feature 1..22: note = chemically synthesized
  source 1..22: mol_type = other DNA
acggacctgggcccatctgttt

SEQ ID NO: 67718 - DNA, 22 bp, synthetic construct
  misc_feature 1..22: note = chemically synthesized
  source 1..22: mol_type = other DNA
cggacctgggcccatctgtttc

SEQ ID NO: 67719 - DNA, 22 bp, synthetic construct
  misc_feature 1..22: note = chemically synthesized
  source 1..22: mol_type = other DNA
ggcccatctgtttctggagggc

SEQ ID NO: 67720 - DNA, 22 bp, synthetic construct
  misc_feature 1..22: note = chemically synthesized
  source 1..22: mol_type = other DNA
tttctggagggctccagtcttc

SEQ ID NO: 67721 - DNA, 22 bp, synthetic construct
  misc_feature 1..22: note = chemically synthesized
  source 1..22: mol_type = other DNA
ctggagggctccagtcttcctt

SEQ ID NO: 67722 - DNA, 22 bp, synthetic construct
  misc_feature 1..22: note = chemically synthesized
  source 1..22: mol_type = other DNA
tggagggctccagtcttccttg

SEQ ID NO: 67723 - DNA, 22 bp, synthetic construct
  misc_feature 1..22: note = chemically synthesized
  source 1..22: mol_type = other DNA
gagggctccagtcttccttgtc

SEQ ID NO: 67724 - DNA, 22 bp, synthetic construct
  misc_feature 1..22: note = chemically synthesized
  source 1..22: mol_type = other DNA
cagtcttccttgtcctgtcttg

SEQ ID NO: 67725 - DNA, 22 bp, synthetic construct
  misc_feature 1..22: note = chemically synthesized
  source 1..22: mol_type = other DNA
ccttgtcctgtcttggagtccc

SEQ ID NO: 67726 - DNA, 22 bp, synthetic construct
  misc_feature 1..22: note = chemically synthesized
  source 1..22: mol_type = other DNA
cttgtcctgtcttggagtcccc

SEQ ID NO: 67727 - DNA, 22 bp, synthetic construct
  misc_feature 1..22: note = chemically synthesized
  source 1..22: mol_type = other DNA
gtcctgtcttggagtccccaag

SEQ ID NO: 67728 - DNA, 22 bp, synthetic construct
  misc_feature 1..22: note = chemically synthesized
  source 1..22: mol_type = other DNA
tcctgtcttggagtccccaaga

SEQ ID NO: 67729 - DNA, 22 bp, synthetic construct
  misc_feature 1..22: note = chemically synthesized
  source 1..22: mol_type = other DNA
tcttggagtccccaagaaggaa

SEQ ID NO: 67730 - DNA, 22 bp, synthetic construct
  misc_feature 1..22: note = chemically synthesized
  source 1..22: mol_type = other DNA
ggagtccccaagaaggaatcac

SEQ ID NO: 67731 - DNA, 22 bp, synthetic construct
  misc_feature 1..22: note = chemically synthesized
  source 1..22: mol_type = other DNA
gagtccccaagaaggaatcaca

SEQ ID NO: 67732 - DNA, 22 bp, synthetic construct
  misc_feature 1..22: note = chemically synthesized
  source 1..22: mol_type = other DNA
caccaagcatcttcatgtcccc

SEQ ID NO: 67733 - DNA, 22 bp, synthetic construct
  misc_feature 1..22: note = chemically synthesized
  source 1..22: mol_type = other DNA
catgtccccctgctcatccccc

SEQ ID NO: 67734 - DNA, 22 bp, synthetic construct
  misc_feature 1..22: note = chemically synthesized
  source 1..22: mol_type = other DNA
atgtccccctgctcatccccca

SEQ ID NO: 67735 - DNA, 22 bp, synthetic construct
  misc_feature 1..22: note = chemically synthesized
  source 1..22: mol_type = other DNA
ctcatcccccactcccccccac

SEQ ID NO: 67736 - DNA, 22 bp, synthetic construct
  misc_feature 1..22: note = chemically synthesized
  source 1..22: mol_type = other DNA
atcccccactcccccccaccca

SEQ ID NO: 67737 - DNA, 22 bp, synthetic construct
  misc_feature 1..22: note = chemically synthesized
  source 1..22: mol_type = other DNA
ccccccacccagagttgctcat

SEQ ID NO: 67738 - DNA, 22 bp, synthetic construct
  misc_feature 1..22: note = chemically synthesized
  source 1..22: mol_type = other DNA
ctcatcctgccagggctggctg

SEQ ID NO: 67739 - DNA, 22 bp, synthetic construct
  misc_feature 1..22: note = chemically synthesized
  source 1..22: mol_type = other DNA
atcctgccagggctggctgtgc

SEQ ID NO: 67740 - DNA, 22 bp, synthetic construct
  misc_feature 1..22: note = chemically synthesized
  source 1..22: mol_type = other DNA
ccagggctggctgtgcccaccc

SEQ ID NO: 67741 - DNA, 22 bp, synthetic construct
  misc_feature 1..22: note = chemically synthesized
  source 1..22: mol_type = other DNA
gctgtgcccaccccaaggctgc

SEQ ID NO: 67742 - DNA, 22 bp, synthetic construct
  misc_feature 1..22: note = chemically synthesized
  source 1..22: mol_type = other DNA
tgcccaccccaaggctgccctc

SEQ ID NO: 67743 - DNA, 22 bp, synthetic construct
  misc_feature 1..22: note = chemically synthesized
  source 1..22: mol_type = other DNA
ccctcctgggggccccagaact

SEQ ID NO: 67744 - DNA, 22 bp, synthetic construct
  misc_feature 1..22: note = chemically synthesized
  source 1..22: mol_type = other DNA
ctgggggccccagaactgcctg

SEQ ID NO: 67745 - DNA, 22 bp, synthetic construct
  misc_feature 1..22: note = chemically synthesized
  source 1..22: mol_type = other DNA
ggggccccagaactgcctgatc

SEQ ID NO: 67746 - DNA, 22 bp, synthetic construct
  misc_feature 1..22: note = chemically synthesized
  source 1..22: mol_type = other DNA
cctgatcgtgccgtggcccagt

SEQ ID NO: 67747 - DNA, 22 bp, synthetic construct
  misc_feature 1..22: note = chemically synthesized
  source 1..22: mol_type = other DNA
atcgtgccgtggcccagttttg

SEQ ID NO: 67748 - DNA, 22 bp, synthetic construct
  misc_feature 1..22: note = chemically synthesized
  source 1..22: mol_type = other DNA
tgtggcatctgcagcaacacaa

SEQ ID NO: 67749 - DNA, 22 bp, synthetic construct
  misc_feature 1..22: note = chemically synthesized
  source 1..22: mol_type = other DNA
gtggcatctgcagcaacacaag

SEQ ID NO: 67750 - DNA, 22 bp, synthetic construct
  misc_feature 1..22: note = chemically synthesized
  source 1..22: mol_type = other DNA
tggcatctgcagcaacacaaga

SEQ ID NO: 67751 - DNA, 22 bp, synthetic construct
  misc_feature 1..22: note = chemically synthesized
  source 1..22: mol_type = other DNA
cagcaacacaagagagaggaca

SEQ ID NO: 67752 - DNA, 22 bp, synthetic construct
  misc_feature 1..22: note = chemically synthesized
  source 1..22: mol_type = other DNA
ctcttgacccgctgtcacctaa

SEQ ID NO: 67753 - DNA, 22 bp, synthetic construct
  misc_feature 1..22: note = chemically synthesized
  source 1..22: mol_type = other DNA
ttgacccgctgtcacctaacca

SEQ ID NO: 67754 - DNA, 22 bp, synthetic construct
  misc_feature 1..22: note = chemically synthesized
  source 1..22: mol_type = other DNA
gacccgctgtcacctaaccaga

SEQ ID NO: 67755 - DNA, 22 bp, synthetic construct
  misc_feature 1..22: note = chemically synthesized
  source 1..22: mol_type = other DNA
acccgctgtcacctaaccagac

SEQ ID NO: 67756 - DNA, 22 bp, synthetic construct
  misc_feature 1..22: note = chemically synthesized
  source 1..22: mol_type = other DNA
tcacctaaccagactcgggccc

SEQ ID NO: 67757 - DNA, 22 bp, synthetic construct
  misc_feature 1..22: note = chemically synthesized
  source 1..22: mol_type = other DNA
accagactcgggccctgcacct

SEQ ID NO: 67758 - DNA, 22 bp, synthetic construct
  misc_feature 1..22: note = chemically synthesized
  source 1..22: mol_type = other DNA
gggccctgcacctctcaggcac

SEQ ID NO: 67759 - DNA, 22 bp, synthetic construct
  misc_feature 1..22: note = chemically synthesized
  source 1..22: mol_type = other DNA
cacctctcaggcacttctggaa

SEQ ID NO: 67760 - DNA, 22 bp, synthetic construct
  misc_feature 1..22: note = chemically synthesized
  source 1..22: mol_type = other DNA
tcaggcacttctggaaaatgac

SEQ ID NO: 67761 - DNA, 22 bp, synthetic construct
  misc_feature 1..22: note = chemically synthesized
  source 1..22: mol_type = other DNA
aggcacttctggaaaatgactg

SEQ ID NO: 67762 - DNA, 22 bp, synthetic construct
  misc_feature 1..22: note = chemically synthesized
  source 1..22: mol_type = other DNA
ctggaaaatgactgaggcagat

SEQ ID NO: 67763 - DNA, 22 bp, synthetic construct
  misc_feature 1..22: note = chemically synthesized
  source 1..22: mol_type = other DNA
tggaaaatgactgaggcagatt

SEQ ID NO: 67764 - DNA, 22 bp, synthetic construct
  misc_feature 1..22: note = chemically synthesized
  source 1..22: mol_type = other DNA
gaaaatgactgaggcagattct

SEQ ID NO: 67765 - DNA, 22 bp, synthetic construct
  misc_feature 1..22: note = chemically synthesized
  source 1..22: mol_type = other DNA
aggcagattcttcctgaagccc

SEQ ID NO: 67766 - DNA, 22 bp, synthetic construct
  misc_feature 1..22: note = chemically synthesized
  source 1..22: mol_type = other DNA
ttcctgaagcccattctccatg

SEQ ID NO: 67767 - DNA, 22 bp, synthetic construct
  misc_feature 1..22: note = chemically synthesized
  source 1..22: mol_type = other DNA
cctgaagcccattctccatggg

SEQ ID NO: 67768 - DNA, 22 bp, synthetic construct
  misc_feature 1..22: note = chemically synthesized
  source 1..22: mol_type = other DNA
ctgaagcccattctccatgggg

SEQ ID NO: 67769 - DNA, 22 bp, synthetic construct
  misc_feature 1..22: note = chemically synthesized
  source 1..22: mol_type = other DNA
aagcccattctccatggggcaa

SEQ ID NO: 67770 - DNA, 22 bp, synthetic construct
  misc_feature 1..22: note = chemically synthesized
  source 1..22: mol_type = other DNA
tccatggggcaacaaggacacc

SEQ ID NO: 67771 - DNA, 22 bp, synthetic construct
  misc_feature 1..22: note = chemically synthesized
  source 1..22: mol_type = other DNA
catggggcaacaaggacaccta

SEQ ID NO: 67772 - DNA, 22 bp, synthetic construct
  misc_feature 1..22: note = chemically synthesized
  source 1..22: mol_type = other DNA
ttctgtccttgtccttccatcg

SEQ ID NO: 67773 - DNA, 22 bp, synthetic construct
  misc_feature 1..22: note = chemically synthesized
  source 1..22: mol_type = other DNA
tgtccttgtccttccatcgctg

SEQ ID NO: 67774 - DNA, 22 bp, synthetic construct
  misc_feature 1..22: note = chemically synthesized
  source 1..22: mol_type = other DNA
tccttgtccttccatcgctgcc

SEQ ID NO: 67775 - DNA, 22 bp, synthetic construct
  misc_feature 1..22: note = chemically synthesized
  source 1..22: mol_type = other DNA
gtccttccatcgctgccccaga

SEQ ID NO: 67776 - DNA, 22 bp, synthetic construct
  misc_feature 1..22: note = chemically synthesized
  source 1..22: mol_type = other DNA
tccttccatcgctgccccagaa

SEQ ID NO: 67777 - DNA, 22 bp, synthetic construct
  misc_feature 1..22: note = chemically synthesized
  source 1..22: mol_type = other DNA
ccatcgctgccccagaaagcct

SEQ ID NO: 67778 - DNA, 22 bp, synthetic construct
  misc_feature 1..22: note = chemically synthesized
  source 1..22: mol_type = other DNA
catcgctgccccagaaagcctc

SEQ ID NO: 67779 - DNA, 22 bp, synthetic construct
  misc_feature 1..22: note = chemically synthesized
  source 1..22: mol_type = other DNA
ccccagaaagcctcacatatct

SEQ ID NO: 67780 - DNA, 22 bp, synthetic construct
  misc_feature 1..22: note = chemically synthesized
  source 1..22: mol_type = other DNA
acatatctccgtttagaatcag

SEQ ID NO: 67781 - DNA, 22 bp, synthetic construct
  misc_feature 1..22: note = chemically synthesized
  source 1..22: mol_type = other DNA
cgtttagaatcaggtcccttct

SEQ ID NO: 67782 - DNA, 22 bp, synthetic construct
  misc_feature 1..22: note = chemically synthesized
  source 1..22: mol_type = other DNA
agaatcaggtcccttctcccca

SEQ ID NO: 67783 - DNA, 22 bp, synthetic construct
  misc_feature 1..22: note = chemically synthesized
  source 1..22: mol_type = other DNA
gaatcaggtcccttctccccag

SEQ ID NO: 67784 - DNA, 22 bp, synthetic construct
  misc_feature 1..22: note = chemically synthesized
  source 1..22: mol_type = other DNA
ctccccagatgaagaggagggt

SEQ ID NO: 67785 - DNA, 22 bp, synthetic construct
  misc_feature 1..22: note = chemically synthesized
  source 1..22: mol_type = other DNA
tccccagatgaagaggagggtc

SEQ ID NO: 67786 - DNA, 22 bp, synthetic construct
  misc_feature 1..22: note = chemically synthesized
  source 1..22: mol_type = other DNA
cccagatgaagaggagggtctc

SEQ ID NO: 67787 - DNA, 22 bp, synthetic construct
  misc_feature 1..22: note = chemically synthesized
  source 1..22: mol_type = other DNA
tgctttgttttctctatctcct

SEQ ID NO: 67788 - DNA, 22 bp, synthetic construct
  misc_feature 1..22: note = chemically synthesized
  source 1..22: mol_type = other DNA
ctttgttttctctatctcctcc

SEQ ID NO: 67789 - DNA, 22 bp, synthetic construct
  misc_feature 1..22: note = chemically synthesized
  source 1..22: mol_type = other DNA
tgttttctctatctcctcctca

SEQ ID NO: 67790 - DNA, 22 bp, synthetic construct
  misc_feature 1..22: note = chemically synthesized
  source 1..22: mol_type = other DNA
gttttctctatctcctcctcag

SEQ ID NO: 67791 - DNA, 22 bp, synthetic construct
  misc_feature 1..22: note = chemically synthesized
  source 1..22: mol_type = other DNA
ttttctctatctcctcctcaga

SEQ ID NO: 67792 - DNA, 22 bp, synthetic construct
  misc_feature 1..22: note = chemically synthesized
  source 1..22: mol_type = other DNA
tctctatctcctcctcagactt

SEQ ID NO: 67793 - DNA, 22 bp, synthetic construct
  misc_feature 1..22: note = chemically synthesized
  source 1..22: mol_type = other DNA
ctctatctcctcctcagacttg

SEQ ID NO: 67794 - DNA, 22 bp, synthetic construct
  misc_feature 1..22: note = chemically synthesized
  source 1..22: mol_type = other DNA
tctatctcctcctcagacttga

SEQ ID NO: 67795 - DNA, 22 bp, synthetic construct
  misc_feature 1..22: note = chemically synthesized
  source 1..22: mol_type = other DNA
tatctcctcctcagacttgacc

SEQ ID NO: 67796 - DNA, 22 bp, synthetic construct
  misc_feature 1..22: note = chemically synthesized
  source 1..22: mol_type = other DNA
tctcctcctcagacttgaccag

SEQ ID NO: 67797 - DNA, 22 bp, synthetic construct
  misc_feature 1..22: note = chemically synthesized
  source 1..22: mol_type = other DNA
ctcctcagacttgaccaggccc

SEQ ID NO: 67798 - DNA, 22 bp, synthetic construct
  misc_feature 1..22: note = chemically synthesized
  source 1..22: mol_type = other DNA
ctcagacttgaccaggcccagc

SEQ ID NO: 67799 - DNA, 22 bp, synthetic construct
  misc_feature 1..22: note = chemically synthesized
  source 1..22: mol_type = other DNA
agacttgaccaggcccagcagg

SEQ ID NO: 67800 - DNA, 22 bp, synthetic construct
  misc_feature 1..22: note = chemically synthesized
  source 1..22: mol_type = other DNA
gaccaggcccagcaggccccag

SEQ ID NO: 67801 - DNA, 22 bp, synthetic construct
  misc_feature 1..22: note = chemically synthesized
  source 1..22: mol_type = other DNA
accaggcccagcaggccccaga

SEQ ID NO: 67802 - DNA, 22 bp, synthetic construct
  misc_feature 1..22: note = chemically synthesized
  source 1..22: mol_type = other DNA
ccctatatcccttctcctccct

SEQ ID NO: 67803 - DNA, 22 bp, synthetic construct
  misc_feature 1..22: note = chemically synthesized
  source 1..22: mol_type = other DNA
tatcccttctcctccctagtca

SEQ ID NO: 67804 - DNA, 22 bp, synthetic construct
  misc_feature 1..22: note = chemically synthesized
  source 1..22: mol_type = other DNA
ctcctccctagtcacatggcca

SEQ ID NO: 67805 - DNA, 22 bp, synthetic construct
  misc_feature 1..22: note = chemically synthesized
  source 1..22: mol_type = other DNA
tcctccctagtcacatggccat

SEQ ID NO: 67806 - DNA, 22 bp, synthetic construct
  misc_feature 1..22: note = chemically synthesized
  source 1..22: mol_type = other DNA
ctccctagtcacatggccatag

SEQ ID NO: 67807 - DNA, 22 bp, synthetic construct
  misc_feature 1..22: note = chemically synthesized
  source 1..22: mol_type = other DNA
cctagtcacatggccataggcc

SEQ ID NO: 67808 - DNA, 22 bp, synthetic construct
  misc_feature 1..22: note = chemically synthesized
  source 1..22: mol_type = other DNA
gtcacatggccataggcctgct

SEQ ID NO: 67809 - DNA, 22 bp, synthetic construct
  misc_feature 1..22: note = chemically synthesized
  source 1..22: mol_type = other DNA
ctgatggctcaggaaggccatt

SEQ ID NO: 67810 - DNA, 22 bp, synthetic construct
  misc_feature 1..22: note = chemically synthesized
  source 1..22: mol_type = other DNA
atggctcaggaaggccattgca

SEQ ID NO: 67811 - DNA, 22 bp, synthetic construct
  misc_feature 1..22: note = chemically synthesized
  source 1..22: mol_type = other DNA
aggaaggccattgcaaggactc

SEQ ID NO: 67812 - DNA, 22 bp, synthetic construct
  misc_feature 1..22: note = chemically synthesized
  source 1..22: mol_type = other DNA
caaggactcctcagctatggga

SEQ ID NO: 67813 - DNA, 22 bp, synthetic construct
  misc_feature 1..22: note = chemically synthesized
  source 1..22: mol_type = other DNA
ctcagctatgggagaggaagca

SEQ ID NO: 67814 - DNA, 22 bp, synthetic construct
  misc_feature 1..22: note = chemically synthesized
  source 1..22: mol_type = other DNA
agctatgggagaggaagcacat

SEQ ID NO: 67815 - DNA, 22 bp, synthetic construct
  misc_feature 1..22: note = chemically synthesized
  source 1..22: mol_type = other DNA
tgggagaggaagcacatcaccc

SEQ ID NO: 67816 - DNA, 22 bp, synthetic construct
  misc_feature 1..22: note = chemically synthesized
  source 1..22: mol_type = other DNA
acccccgcaacccctccctttc

SEQ ID NO: 67817 - DNA, 22 bp, synthetic construct
  misc_feature 1..22: note = chemically synthesized
  source 1..22: mol_type = other DNA
cctttcctcctctgagtcccga

SEQ ID NO: 67818 - DNA, 22 bp, synthetic construct
  misc_feature 1..22: note = chemically synthesized
  source 1..22: mol_type = other DNA
tcctcctctgagtcccgactgg

SEQ ID NO: 67819 - DNA, 22 bp, synthetic construct
  misc_feature 1..22: note = chemically synthesized
  source 1..22: mol_type = other DNA
cctcctctgagtcccgactggg

SEQ ID NO: 67820 - DNA, 22 bp, synthetic construct
  misc_feature 1..22: note = chemically synthesized
  source 1..22: mol_type = other DNA
ctcctctgagtcccgactgggg

SEQ ID NO: 67821 - DNA, 22 bp, synthetic construct
  misc_feature 1..22: note = chemically synthesized
  source 1..22: mol_type = other DNA
ctctgagtcccgactggggcca

SEQ ID NO: 67822 - DNA, 22 bp, synthetic construct
  misc_feature 1..22: note = chemically synthesized
  source 1..22: mol_type = other DNA
tgagtcccgactggggccacat

SEQ ID NO: 67823 - DNA, 22 bp, synthetic construct
  misc_feature 1..22: note = chemically synthesized
  source 1..22: mol_type = other DNA
agtcccgactggggccacatgc

SEQ ID NO: 67824 - DNA, 22 bp, synthetic construct
  misc_feature 1..22: note = chemically synthesized
  source 1..22: mol_type = other DNA
gggccacatgcagcctgacttc

SEQ ID NO: 67825 - DNA, 22 bp, synthetic construct
  misc_feature 1..22: note = chemically synthesized
  source 1..22: mol_type = other DNA
acttctttgtgcctgttgctgt

SEQ ID NO: 67826 - DNA, 22 bp, synthetic construct
  misc_feature 1..22: note = chemically synthesized
  source 1..22: mol_type = other DNA
ctttgtgcctgttgctgtccct

SEQ ID NO: 67827 - DNA, 22 bp, synthetic construct
  misc_feature 1..22: note = chemically synthesized
  source 1..22: mol_type = other DNA
tttgtgcctgttgctgtccctg

SEQ ID NO: 67828 - DNA, 22 bp, synthetic construct
  misc_feature 1..22: note = chemically synthesized
  source 1..22: mol_type = other DNA
tgtgcctgttgctgtccctgca

SEQ ID NO: 67829 - DNA, 22 bp, synthetic construct
  misc_feature 1..22: note = chemically synthesized
  source 1..22: mol_type = other DNA
gtgcctgttgctgtccctgcag

SEQ ID NO: 67830 - DNA, 22 bp, synthetic construct
  misc_feature 1..22: note = chemically synthesized
  source 1..22: mol_type = other DNA
tgcctgttgctgtccctgcagt

SEQ ID NO: 67831 - DNA, 22 bp, synthetic construct
  misc_feature 1..22: note = chemically synthesized
  source 1..22: mol_type = other DNA
ttgctgtccctgcagtcttcag

SEQ ID NO: 67832 - DNA, 22 bp, synthetic construct
  misc_feature 1..22: note = chemically synthesized
  source 1..22: mol_type = other DNA
ctgtccctgcagtcttcagagg

SEQ ID NO: 67833 - DNA, 22 bp, synthetic construct
  misc_feature 1..22: note = chemically synthesized
  source 1..22: mol_type = other DNA
tccctgcagtcttcagagggcc

SEQ ID NO: 67834 - DNA, 22 bp, synthetic construct
  misc_feature 1..22: note = chemically synthesized
  source 1..22: mol_type = other DNA
cagtcttcagagggccaccgca

SEQ ID NO: 67835 - DNA, 22 bp, synthetic construct
  misc_feature 1..22: note = chemically synthesized
  source 1..22: mol_type = other DNA
cagagggccaccgcagctccag

SEQ ID NO: 67836 - DNA, 22 bp, synthetic construct
  misc_feature 1..22: note = chemically synthesized
  source 1..22: mol_type = other DNA
agagggccaccgcagctccagt

SEQ ID NO: 67837 - DNA, 22 bp, synthetic construct
  misc_feature 1..22: note = chemically synthesized
  source 1..22: mol_type = other DNA
cagtgccacggcaggaggctgt

SEQ ID NO: 67838 - DNA, 22 bp, synthetic construct
  misc_feature 1..22: note = chemically synthesized
  source 1..22: mol_type = other DNA
ttcctgaatagcccctgtggta

SEQ ID NO: 67839 - DNA, 22 bp, synthetic construct
  misc_feature 1..22: note = chemically synthesized
  source 1..22: mol_type = other DNA
ctgaatagcccctgtggtaagg

SEQ ID NO: 67840 - DNA, 22 bp, synthetic construct
  misc_feature 1..22: note = chemically synthesized
  source 1..22: mol_type = other DNA
aatagcccctgtggtaagggcc

SEQ ID NO: 67841 - DNA, 22 bp, synthetic construct
  misc_feature 1..22: note = chemically synthesized
  source 1..22: mol_type = other DNA
tggtaagggccaggagagtcct

SEQ ID NO: 67842 - DNA, 22 bp, synthetic construct
  misc_feature 1..22: note = chemically synthesized
  source 1..22: mol_type = other DNA
ccatcctccaaggccctgctaa

SEQ ID NO: 67843 - DNA, 22 bp, synthetic construct
  misc_feature 1..22: note = chemically synthesized
  source 1..22: mol_type = other DNA
catcctccaaggccctgctaaa

SEQ ID NO: 67844 - DNA, 22 bp, synthetic construct
  misc_feature 1..22: note = chemically synthesized
  source 1..22: mol_type = other DNA
caaggccctgctaaaggacaca

SEQ ID NO: 67845 - DNA, 22 bp, synthetic construct
  misc_feature 1..22: note = chemically synthesized
  source 1..22: mol_type = other DNA
ctaaaggacacagcagccagga

SEQ ID NO: 67846 - DNA, 22 bp, synthetic construct
  misc_feature 1..22: note = chemically synthesized
  source 1..22: mol_type = other DNA
aaggacacagcagccaggaagt

SEQ ID NO: 67847 - DNA, 22 bp, synthetic construct
  misc_feature 1..22: note = chemically synthesized
  source 1..22: mol_type = other DNA
ggcccctagctgaaggacagcc

SEQ ID NO: 67848 - DNA, 22 bp, synthetic construct
  misc_feature 1..22: note = chemically synthesized
  source 1..22: mol_type = other DNA
gctgaaggacagcctgctccct

SEQ ID NO: 67849 - DNA, 22 bp, synthetic construct
  misc_feature 1..22: note = chemically synthesized
  source 1..22: mol_type = other DNA
aaggacagcctgctccctccgt

SEQ ID NO: 67850 - DNA, 22 bp, synthetic construct
  misc_feature 1..22: note = chemically synthesized
  source 1..22: mol_type = other DNA
ctccctccgtctctaccaggaa

SEQ ID NO: 67851 - DNA, 22 bp, synthetic construct
  misc_feature 1..22: note = chemically synthesized
  source 1..22: mol_type = other DNA
cctccgtctctaccaggaatgg

SEQ ID NO: 67852 - DNA, 22 bp, synthetic construct
  misc_feature 1..22: note = chemically synthesized
  source 1..22: mol_type = other DNA
cgtctctaccaggaatggcctt

SEQ ID NO: 67853 - DNA, 22 bp, synthetic construct
  misc_feature 1..22: note = chemically synthesized
  source 1..22: mol_type = other DNA
taccaggaatggccttgtccta

SEQ ID NO: 67854 - DNA, 22 bp, synthetic construct
  misc_feature 1..22: note = chemically synthesized
  source 1..22: mol_type = other DNA
ccaggaatggccttgtcctatg

SEQ ID NO: 67855 - DNA, 22 bp, synthetic construct
  misc_feature 1..22: note = chemically synthesized
  source 1..22: mol_type = other DNA
gtcctatggaaggcactgcccc

SEQ ID NO: 67856 - DNA, 22 bp, synthetic construct
  misc_feature 1..22: note = chemically synthesized
  source 1..22: mol_type = other DNA
tcctatggaaggcactgcccca

SEQ ID NO: 67857 - DNA, 22 bp, synthetic construct
  misc_feature 1..22: note = chemically synthesized
  source 1..22: mol_type = other DNA
tggaaggcactgccccatccca

SEQ ID NO: 67858 - DNA, 22 bp, synthetic construct
  misc_feature 1..22: note = chemically synthesized
  source 1..22: mol_type = other DNA
ccccatcccaaactaatctagg

SEQ ID NO: 67859 - DNA, 22 bp, synthetic construct
  misc_feature 1..22: note = chemically synthesized
  source 1..22: mol_type = other DNA
atctaggaatcactgtctaacc

SEQ ID NO: 67860 - DNA, 22 bp, synthetic construct
  misc_feature 1..22: note = chemically synthesized
  source 1..22: mol_type = other DNA
ggaatcactgtctaaccactca

SEQ ID NO: 67861 - DNA, 22 bp, synthetic construct
  misc_feature 1..22: note = chemically synthesized
  source 1..22: mol_type = other DNA
tctaaccactcactgtcatgaa

SEQ ID NO: 67862 - DNA, 22 bp, synthetic construct
  misc_feature 1..22: note = chemically synthesized
  source 1..22: mol_type = other DNA
accactcactgtcatgaatgtg

SEQ ID NO: 67863 - DNA, 22 bp, synthetic construct
  misc_feature 1..22: note = chemically synthesized
  source 1..22: mol_type = other DNA
actgtcatgaatgtgtacttaa

SEQ ID NO: 67864 - DNA, 22 bp, synthetic construct
  misc_feature 1..22: note = chemically synthesized
  source 1..22: mol_type = other DNA
tcatgaatgtgtacttaaagga

SEQ ID NO: 67865 - DNA, 22 bp, synthetic construct
  misc_feature 1..22: note = chemically synthesized
  source 1..22: mol_type = other DNA
aaaggatgaggttgagtcatac

SEQ ID NO: 67866 - DNA, 22 bp, synthetic construct
  misc_feature 1..22: note = chemically synthesized
  source 1..22: mol_type = other DNA
aaggatgaggttgagtcatacc

SEQ ID NO: 67867 - DNA, 22 bp, synthetic construct
  misc_feature 1..22: note = chemically synthesized
  source 1..22: mol_type = other DNA
agtcataccaaatagtgatttc

SEQ ID NO: 67868 - DNA, 22 bp, synthetic construct
  misc_feature 1..22: note = chemically synthesized
  source 1..22: mol_type = other DNA
cgatagttcaaaatggtgaaat

SEQ ID NO: 67869 - DNA, 22 bp, synthetic construct
  misc_feature 1..22: note = chemically synthesized
  source 1..22: mol_type = other DNA
gatagttcaaaatggtgaaatt

SEQ ID NO: 67870 - DNA, 22 bp, synthetic construct
  misc_feature 1..22: note = chemically synthesized
  source 1..22: mol_type = other DNA
aaaatggtgaaattagcaattc

SEQ ID NO: 67871 - DNA, 22 bp, synthetic construct
  misc_feature 1..22: note = chemically synthesized
  source 1..22: mol_type = other DNA
gcaattctacatgattcagtct

SEQ ID NO: 67872 - DNA, 22 bp, synthetic construct
  misc_feature 1..22: note = chemically synthesized
  source 1..22: mol_type = other DNA
tacatgattcagtctaatcaat

SEQ ID NO: 67873 - DNA, 22 bp, synthetic construct
  misc_feature 1..22: note = chemically synthesized
  source 1..22: mol_type = other DNA
catgattcagtctaatcaatgg

SEQ ID NO: 67874 - DNA, 22 bp, synthetic construct
  misc_feature 1..22: note = chemically synthesized
  source 1..22: mol_type = other DNA
agtctaatcaatggataccgac

SEQ ID NO: 67875 - DNA, 22 bp, synthetic construct
  misc_feature 1..22: note = chemically synthesized
  source 1..22: mol_type = other DNA
atcaatggataccgactgtttc

SEQ ID NO: 67876 - DNA, 22 bp, synthetic construct
  misc_feature 1..22: note = chemically synthesized
  source 1..22: mol_type = other DNA
tttcccacacaagtctcctgtt

SEQ ID NO: 67877 - DNA, 22 bp, synthetic construct
  misc_feature 1..22: note = chemically synthesized
  source 1..22: mol_type = other DNA
cccacacaagtctcctgttctc

SEQ ID NO: 67878 - DNA, 22 bp, synthetic construct
  misc_feature 1..22: note = chemically synthesized
  source 1..22: mol_type = other DNA
ccacacaagtctcctgttctct

SEQ ID NO: 67879 - DNA, 22 bp, synthetic construct
  misc_feature 1..22: note = chemically synthesized
  source 1..22: mol_type = other DNA
ctgttctcttaagcttactcac

SEQ ID NO: 67880 - DNA, 22 bp, synthetic construct
  misc_feature 1..22: note = chemically synthesized
  source 1..22: mol_type = other DNA
ttctcttaagcttactcactga

SEQ ID NO: 67881 - DNA, 22 bp, synthetic construct
  misc_feature 1..22: note = chemically synthesized
  source 1..22: mol_type = other DNA
tcttaagcttactcactgacag

SEQ ID NO: 67882 - DNA, 22 bp, synthetic construct
  misc_feature 1..22: note = chemically synthesized
  source 1..22: mol_type = other DNA
ttaagcttactcactgacagcc

SEQ ID NO: 67883 - DNA, 22 bp, synthetic construct
  misc_feature 1..22: note = chemically synthesized
  source 1..22: mol_type = other DNA
aagcttactcactgacagcctt

SEQ ID NO: 67884 - DNA, 22 bp, synthetic construct
  misc_feature 1..22: note = chemically synthesized
  source 1..22: mol_type = other DNA
agcttactcactgacagccttt

SEQ ID NO: 67885 - DNA, 22 bp, synthetic construct
  misc_feature 1..22: note = chemically synthesized
  source 1..22: mol_type = other DNA
actcactgacagcctttcactc

SEQ ID NO: 67886 - DNA, 22 bp, synthetic construct
  misc_feature 1..22: note = chemically synthesized
  source 1..22: mol_type = other DNA
ctcactgacagcctttcactct

SEQ ID NO: 67887 - DNA, 22 bp, synthetic construct
  misc_feature 1..22: note = chemically synthesized
  source 1..22: mol_type = other DNA
actgacagcctttcactctcca

SEQ ID NO: 67888 - DNA, 22 bp, synthetic construct
  misc_feature 1..22: note = chemically synthesized
  source 1..22: mol_type = other DNA
acagcctttcactctccacaaa

SEQ ID NO: 67889 - DNA, 22 bp, synthetic construct
  misc_feature 1..22: note = chemically synthesized
  source 1..22: mol_type = other DNA
tcactctccacaaatacattaa

SEQ ID NO: 67890 - DNA, 22 bp, synthetic construct
  misc_feature 1..22: note = chemically synthesized
  source 1..22: mol_type = other DNA
cactctccacaaatacattaaa

SEQ ID NO: 67891 - DNA, 22 bp, synthetic construct
  misc_feature 1..22: note = chemically synthesized
  source 1..22: mol_type = other DNA
actctccacaaatacattaaag

SEQ ID NO: 67892 - DNA, 22 bp, synthetic construct
  misc_feature 1..22: note = chemically synthesized
  source 1..22: mol_type = other DNA
tccacaaatacattaaagatat

SEQ ID NO: 67893 - DNA, 22 bp, synthetic construct
  misc_feature 1..22: note = chemically synthesized
  source 1..22: mol_type = other DNA
cacaaatacattaaagatatgg

SEQ ID NO: 67894 - DNA, 22 bp, synthetic construct
  misc_feature 1..22: note = chemically synthesized
  source 1..22: mol_type = other DNA
aagatatggccatcaccaagcc

SEQ ID NO: 67895 - DNA, 22 bp, synthetic construct
  misc_feature 1..22: note = chemically synthesized
  source 1..22: mol_type = other DNA
ggatgacaccagacctgagagt

SEQ ID NO: 67896 - DNA, 22 bp, synthetic construct
  misc_feature 1..22: note = chemically synthesized
  source 1..22: mol_type = other DNA
agagtctgaagacctggatcca

SEQ ID NO: 67897 - DNA, 22 bp, synthetic construct
  misc_feature 1..22: note = chemically synthesized
  source 1..22: mol_type = other DNA
aagacctggatccaagttctga

SEQ ID NO: 67898 - DNA, 22 bp, synthetic construct
  misc_feature 1..22: note = chemically synthesized
  source 1..22: mol_type = other DNA
gatccaagttctgacttttccc

SEQ ID NO: 67899 - DNA, 22 bp, synthetic construct
  misc_feature 1..22: note = chemically synthesized
  source 1..22: mol_type = other DNA
tgacttttccccctgacagctg

SEQ ID NO: 67900 - DNA, 22 bp, synthetic construct
  misc_feature 1..22: note = chemically synthesized
  source 1..22: mol_type = other DNA
acttttccccctgacagctgtg

SEQ ID NO: 67901 - DNA, 22 bp, synthetic construct
  misc_feature 1..22: note = chemically synthesized
  source 1..22: mol_type = other DNA
ttccccctgacagctgtgtgac

SEQ ID NO: 67902 - DNA, 22 bp, synthetic construct
  misc_feature 1..22: note = chemically synthesized
  source 1..22: mol_type = other DNA
tccccctgacagctgtgtgacc

SEQ ID NO: 67903 - DNA, 22 bp, synthetic construct
  misc_feature 1..22: note = chemically synthesized
  source 1..22: mol_type = other DNA
ccccctgacagctgtgtgacct

SEQ ID NO: 67904 - DNA, 22 bp, synthetic construct
  misc_feature 1..22: note = chemically synthesized
  source 1..22: mol_type = other DNA
cccctgacagctgtgtgacctt

SEQ ID NO: 67905 - DNA, 22 bp, synthetic construct
  misc_feature 1..22: note = chemically synthesized
  source 1..22: mol_type = other DNA
acagctgtgtgaccttcgtgaa

SEQ ID NO: 67906 - DNA, 22 bp, synthetic construct
  misc_feature 1..22: note = chemically synthesized
  source 1..22: mol_type = other DNA
tgtgaccttcgtgaagtcgcca

SEQ ID NO: 67907 - DNA, 22 bp, synthetic construct
  misc_feature 1..22: note = chemically synthesized
  source 1..22: mol_type = other DNA
cgtgaagtcgccaaacctctct

SEQ ID NO: 67908 - DNA, 22 bp, synthetic construct
  misc_feature 1..22: note = chemically synthesized
  source 1..22: mol_type = other DNA
gtgaagtcgccaaacctctctg

SEQ ID NO: 67909 - DNA, 22 bp, synthetic construct
  misc_feature 1..22: note = chemically synthesized
  source 1..22: mol_type = other DNA
tctgagccccagtcattgctag

SEQ ID NO: 67910 - DNA, 22 bp, synthetic construct
  misc_feature 1..22: note = chemically synthesized
  source 1..22: mol_type = other DNA
tgagccccagtcattgctagta

SEQ ID NO: 67911 - DNA, 22 bp, synthetic construct
  misc_feature 1..22: note = chemically synthesized
  source 1..22: mol_type = other DNA
agccccagtcattgctagtaag

SEQ ID NO: 67912 - DNA, 22 bp, synthetic construct
  misc_feature 1..22: note = chemically synthesized
  source 1..22: mol_type = other DNA
ctagtaagacctgcctttgagt

SEQ ID NO: 67913 - DNA, 22 bp, synthetic construct
  misc_feature 1..22: note = chemically synthesized
  source 1..22: mol_type = other DNA
gtaagacctgcctttgagttgg

SEQ ID NO: 67914 - DNA, 22 bp, synthetic construct
  misc_feature 1..22: note = chemically synthesized
  source 1..22: mol_type = other DNA
cctttgagttggtatgatgttc

SEQ ID NO: 67915 - DNA, 22 bp, synthetic construct
  misc_feature 1..22: note = chemically synthesized
  source 1..22: mol_type = other DNA
tgagttggtatgatgttcaagt

SEQ ID NO: 67916 - DNA, 22 bp, synthetic construct
  misc_feature 1..22: note = chemically synthesized
  source 1..22: mol_type = other DNA
gagttggtatgatgttcaagtt

SEQ ID NO: 67917 - DNA, 22 bp, synthetic construct
  misc_feature 1..22: note = chemically synthesized
  source 1..22: mol_type = other DNA
agttggtatgatgttcaagtta

SEQ ID NO: 67918 - DNA, 22 bp, synthetic construct
  misc_feature 1..22: note = chemically synthesized
  source 1..22: mol_type = other DNA
gtatgatgttcaagttagataa

SEQ ID NO: 67919 - DNA, 22 bp, synthetic construct
  misc_feature 1..22: note = chemically synthesized
  source 1..22: mol_type = other DNA
aagttagataacaaaatgttta

SEQ ID NO: 67920 - DNA, 22 bp, synthetic construct
  misc_feature 1..22: note = chemically synthesized
  source 1..22: mol_type = other DNA
gataacaaaatgtttataccca

SEQ ID NO: 67921 - DNA, 22 bp, synthetic construct
  misc_feature 1..22: note = chemically synthesized
  source 1..22: mol_type = other DNA
atacccattagaacagagaata

SEQ ID NO: 67922 - DNA, 22 bp, synthetic construct
  misc_feature 1..22: note = chemically synthesized
  source 1..22: mol_type = other DNA
tacccattagaacagagaataa

SEQ ID NO: 67923 - DNA, 22 bp, synthetic construct
  misc_feature 1..22: note = chemically synthesized
  source 1..22: mol_type = other DNA
gaacagagaataaatagaacta

SEQ ID NO: 67924 - DNA, 22 bp, synthetic construct
  misc_feature 1..22: note = chemically synthesized
  source 1..22: mol_type = other DNA
catttcttgcacttatgagctt

SEQ ID NO: 67925 - DNA, 22 bp, synthetic construct
  misc_feature 1..22: note = chemically synthesized
  source 1..22: mol_type = other DNA
cttgcacttatgagctttctgt

SEQ ID NO: 67926 - DNA, 22 bp, synthetic construct
  misc_feature 1..22: note = chemically synthesized
  source 1..22: mol_type = other DNA
ttgcacttatgagctttctgtg

SEQ ID NO: 67927 - DNA, 22 bp, synthetic construct
  misc_feature 1..22: note = chemically synthesized
  source 1..22: mol_type = other DNA
gcacttatgagctttctgtgaa

SEQ ID NO: 67928 - DNA, 22 bp, synthetic construct
  misc_feature 1..22: note = chemically synthesized
  source 1..22: mol_type = other DNA
cacttatgagctttctgtgaat

SEQ ID NO: 67929 - DNA, 22 bp, synthetic construct
  misc_feature 1..22: note = chemically synthesized
  source 1..22: mol_type = other DNA
atgagctttctgtgaatcagac

SEQ ID NO: 67930 - DNA, 22 bp, synthetic construct
  misc_feature 1..22: note = chemically synthesized
  source 1..22: mol_type = other DNA
tgagctttctgtgaatcagaca

SEQ ID NO: 67931 - DNA, 22 bp, synthetic construct
  misc_feature 1..22: note = chemically synthesized
  source 1..22: mol_type = other DNA
tctgtgaatcagacatccctat

SEQ ID NO: 67932 - DNA, 22 bp, synthetic construct
  misc_feature 1..22: note = chemically synthesized
  source 1..22: mol_type = other DNA
ctgtgaatcagacatccctatg

SEQ ID NO: 67933 - DNA, 22 bp, synthetic construct
  misc_feature 1..22: note = chemically synthesized
  source 1..22: mol_type = other DNA
tgtgaatcagacatccctatga

SEQ ID NO: 67934 - DNA, 22 bp, synthetic construct
  misc_feature 1..22: note = chemically synthesized
  source 1..22: mol_type = other DNA
tgaatcagacatccctatgaag

SEQ ID NO: 67935 - DNA, 22 bp, synthetic construct
  misc_feature 1..22: note = chemically synthesized
  source 1..22: mol_type = other DNA
tgaagtacctcccctggctgtt

SEQ ID NO: 67936 - DNA, 22 bp, synthetic construct
  misc_feature 1..22: note = chemically synthesized
  source 1..22: mol_type = other DNA
ccctggctgtttctcatttact

SEQ ID NO: 67937 - DNA, 22 bp, synthetic construct
  misc_feature 1..22: note = chemically synthesized
  source 1..22: mol_type = other DNA
gctgtttctcatttactcactg

SEQ ID NO: 67938 - DNA, 22 bp, synthetic construct
  misc_feature 1..22: note = chemically synthesized
  source 1..22: mol_type = other DNA
tttctcatttactcactgtagc

SEQ ID NO: 67939 - DNA, 22 bp, synthetic construct
  misc_feature 1..22: note = chemically synthesized
  source 1..22: mol_type = other DNA
ctcatttactcactgtagcagc

SEQ ID NO: 67940 - DNA, 22 bp, synthetic construct
  misc_feature 1..22: note = chemically synthesized
  source 1..22: mol_type = other DNA
tcatttactcactgtagcagca

SEQ ID NO: 67941 - DNA, 22 bp, synthetic construct
  misc_feature 1..22: note = chemically synthesized
  source 1..22: mol_type = other DNA
atttactcactgtagcagcact

SEQ ID NO: 67942 - DNA, 22 bp, synthetic construct
  misc_feature 1..22: note = chemically synthesized
  source 1..22: mol_type = other DNA
actcactgtagcagcactgcga

SEQ ID NO: 67943 - DNA, 22 bp, synthetic construct
  misc_feature 1..22: note = chemically synthesized
  source 1..22: mol_type = other DNA
ctcactgtagcagcactgcgat

SEQ ID NO: 67944 - DNA, 22 bp, synthetic construct
  misc_feature 1..22: note = chemically synthesized
  source 1..22: mol_type = other DNA
actgtagcagcactgcgatgtg

SEQ ID NO: 67945 - DNA, 22 bp, synthetic construct
  misc_feature 1..22: note = chemically synthesized
  source 1..22: mol_type = other DNA
tagcagcactgcgatgtgtgag

SEQ ID NO: 67946 - DNA, 22 bp, synthetic construct
  misc_feature 1..22: note = chemically synthesized
  source 1..22: mol_type = other DNA
cgatgtgtgagtatatctgctg

SEQ ID NO: 67947 - DNA, 22 bp, synthetic construct
  misc_feature 1..22: note = chemically synthesized
  source 1..22: mol_type = other DNA
ctgtgctcttaaactccaaatc

SEQ ID NO: 67948 - DNA, 22 bp, synthetic construct
  misc_feature 1..22: note = chemically synthesized
  source 1..22: mol_type = other DNA
tgctcttaaactccaaatctga

SEQ ID NO: 67949 - DNA, 22 bp, synthetic construct
  misc_feature 1..22: note = chemically synthesized
  source 1..22: mol_type = other DNA
ttaaactccaaatctgaggaaa

SEQ ID NO: 67950 - DNA, 22 bp, synthetic construct
  misc_feature 1..22: note = chemically synthesized
  source 1..22: mol_type = other DNA
aaactccaaatctgaggaaact

SEQ ID NO: 67951 - DNA, 22 bp, synthetic construct
  misc_feature 1..22: note = chemically synthesized
  source 1..22: mol_type = other DNA
aactccaaatctgaggaaactg

SEQ ID NO: 67952 - DNA, 22 bp, synthetic construct
  misc_feature 1..22: note = chemically synthesized
  source 1..22: mol_type = other DNA
caaatctgaggaaactgaggct

SEQ ID NO: 67953 - DNA, 22 bp, synthetic construct
  misc_feature 1..22: note = chemically synthesized
  source 1..22: mol_type = other DNA
aggaaactgaggctcagagagg

SEQ ID NO: 67954 - DNA, 22 bp, synthetic construct
  misc_feature 1..22: note = chemically synthesized
  source 1..22: mol_type = other DNA
aggctcagagaggctactggtc

SEQ ID NO: 67955 - DNA, 22 bp, synthetic construct
  misc_feature 1..22: note = chemically synthesized
  source 1..22: mol_type = other DNA
agagaggctactggtctcccac

SEQ ID NO: 67956 - DNA, 22 bp, synthetic construct
  misc_feature 1..22: note = chemically synthesized
  source 1..22: mol_type = other DNA
ctggtctcccacaatgtcacac

SEQ ID NO: 67957 - DNA, 22 bp, synthetic construct
  misc_feature 1..22: note = chemically synthesized
  source 1..22: mol_type = other DNA
gtctcccacaatgtcacacagc

SEQ ID NO: 67958 - DNA, 22 bp, synthetic construct
  misc_feature 1..22: note = chemically synthesized
  source 1..22: mol_type = other DNA
ccacaatgtcacacagctcata

SEQ ID NO: 67959 - DNA, 22 bp, synthetic construct
  misc_feature 1..22: note = chemically synthesized
  source 1..22: mol_type = other DNA
ataagtggcaaagctggcttga

SEQ ID NO: 67960 - DNA, 22 bp, synthetic construct
  misc_feature 1..22: note = chemically synthesized
  source 1..22: mol_type = other DNA
gcttgatgggctacttgttcct

SEQ ID NO: 67961 - DNA, 22 bp, synthetic construct
  misc_feature 1..22: note = chemically synthesized
  source 1..22: mol_type = other DNA
gatgggctacttgttcctctga

SEQ ID NO: 67962 - DNA, 22 bp, synthetic construct
  misc_feature 1..22: note = chemically synthesized
  source 1..22: mol_type = other DNA
atgggctacttgttcctctgaa

SEQ ID NO: 67963 - DNA, 22 bp, synthetic construct
  misc_feature 1..22: note = chemically synthesized
  source 1..22: mol_type = other DNA
cttgttcctctgaaccatacca

SEQ ID NO: 67964 - DNA, 22 bp, synthetic construct
  misc_feature 1..22: note = chemically synthesized
  source 1..22: mol_type = other DNA
gttcctctgaaccataccacct

SEQ ID NO: 67965 - DNA, 22 bp, synthetic construct
  misc_feature 1..22: note = chemically synthesized
  source 1..22: mol_type = other DNA
ttcctctgaaccataccacctc

SEQ ID NO: 67966 - DNA, 22 bp, synthetic construct
  misc_feature 1..22: note = chemically synthesized
  source 1..22: mol_type = other DNA
ctctgaaccataccacctcacc

SEQ ID NO: 67967 - DNA, 22 bp, synthetic construct
  misc_feature 1..22: note = chemically synthesized
  source 1..22: mol_type = other DNA
tgaaccataccacctcaccaca

SEQ ID NO: 67968 - DNA, 22 bp, synthetic construct
  misc_feature 1..22: note = chemically synthesized
  source 1..22: mol_type = other DNA
aaccataccacctcaccacact

SEQ ID NO: 67969 - DNA, 22 bp, synthetic construct
  misc_feature 1..22: note = chemically synthesized
  source 1..22: mol_type = other DNA
accacactctccccttcgaggg

SEQ ID NO: 67970 - DNA, 22 bp, synthetic construct
  misc_feature 1..22: note = chemically synthesized
  source 1..22: mol_type = other DNA
tccccttcgagggtcacgctaa

SEQ ID NO: 67971 - DNA, 22 bp, synthetic construct
  misc_feature 1..22: note = chemically synthesized
  source 1..22: mol_type = other DNA
cccttcgagggtcacgctaaac

SEQ ID NO: 67972 - DNA, 22 bp, synthetic construct
  misc_feature 1..22: note = chemically synthesized
  source 1..22: mol_type = other DNA
cgagggtcacgctaaacttctg

SEQ ID NO: 67973 - DNA, 22 bp, synthetic construct
  misc_feature 1..22: note = chemically synthesized
  source 1..22: mol_type = other DNA
gagggtcacgctaaacttctgc

SEQ ID NO: 67974 - DNA, 22 bp, synthetic construct
  misc_feature 1..22: note = chemically synthesized
  source 1..22: mol_type = other DNA
aacttctgcagaggtaattcct

SEQ ID NO: 67975 - DNA, 22 bp, synthetic construct
  misc_feature 1..22: note = chemically synthesized
  source 1..22: mol_type = other DNA
ctgcagaggtaattcctcctta

SEQ ID NO: 67976 - DNA, 22 bp, synthetic construct
  misc_feature 1..22: note = chemically synthesized
  source 1..22: mol_type = other DNA
tgcagaggtaattcctccttaa

SEQ ID NO: 67977 - DNA, 22 bp, synthetic construct
  misc_feature 1..22: note = chemically synthesized
  source 1..22: mol_type = other DNA
cagaggtaattcctccttaaac

SEQ ID NO: 67978 - DNA, 22 bp, synthetic construct
  misc_feature 1..22: note = chemically synthesized
  source 1..22: mol_type = other DNA
ctccttaaaccagaagggttgc

SEQ ID NO: 67979 - DNA, 22 bp, synthetic construct
  misc_feature 1..22: note = chemically synthesized
  source 1..22: mol_type = other DNA
cttaaaccagaagggttgctgg

SEQ ID NO: 67980 - DNA, 22 bp, synthetic construct
  misc_feature 1..22: note = chemically synthesized
  source 1..22: mol_type = other DNA
aaaccagaagggttgctggtgg

SEQ ID NO: 67981 - DNA, 22 bp, synthetic construct
  misc_feature 1..22: note = chemically synthesized
  source 1..22: mol_type = other DNA
aaccagaagggttgctggtggc

SEQ ID NO: 67982 - DNA, 22 bp, synthetic construct
  misc_feature 1..22: note = chemically synthesized
  source 1..22: mol_type = other DNA
ctggtggcccacagctcacgcc

SEQ ID NO: 67983 - DNA, 22 bp, synthetic construct
  misc_feature 1..22: note = chemically synthesized
  source 1..22: mol_type = other DNA
gtggcccacagctcacgcctag

SEQ ID NO: 67984 - DNA, 22 bp, synthetic construct
  misc_feature 1..22: note = chemically synthesized
  source 1..22: mol_type = other DNA
acgcctagcacacttcatgaga

SEQ ID NO: 67985 - DNA, 22 bp, synthetic construct
  misc_feature 1..22: note = chemically synthesized
  source 1..22: mol_type = other DNA
gcacacttcatgagaaaaacac

SEQ ID NO: 67986 - DNA, 22 bp, synthetic construct
  misc_feature 1..22: note = chemically synthesized
  source 1..22: mol_type = other DNA
catgagaaaaacaccctgtgcc

SEQ ID NO: 67987 - DNA, 22 bp, synthetic construct
  misc_feature 1..22: note = chemically synthesized
  source 1..22: mol_type = other DNA
atgagaaaaacaccctgtgccc

SEQ ID NO: 67988 - DNA, 22 bp, synthetic construct
  misc_feature 1..22: note = chemically synthesized
  source 1..22: mol_type = other DNA
tgcccagtgtggagcaggcatt

SEQ ID NO: 67989 - DNA, 22 bp, synthetic construct
  misc_feature 1..22: note = chemically synthesized
  source 1..22: mol_type = other DNA
agctgaaggtggtgagcagaag

SEQ ID NO: 67990 - DNA, 22 bp, synthetic construct
  misc_feature 1..22: note = chemically synthesized
  source 1..22: mol_type = other DNA
aaggtggtgagcagaagctcat

SEQ ID NO: 67991 - DNA, 22 bp, synthetic construct
  misc_feature 1..22: note = chemically synthesized
  source 1..22: mol_type = other DNA
atccaccagatgttgacacagc

SEQ ID NO: 67992 - DNA, 22 bp, synthetic construct
  misc_feature 1..22: note = chemically synthesized
  source 1..22: mol_type = other DNA
acacagcccgcagccttgggcg

SEQ ID NO: 67993 - DNA, 22 bp, synthetic construct
  misc_feature 1..22: note = chemically synthesized
  source 1..22: mol_type = other DNA
gggcgacccacaggactcctct

SEQ ID NO: 67994 - DNA, 22 bp, synthetic construct
  misc_feature 1..22: note = chemically synthesized
  source 1..22: mol_type = other DNA
ggcgacccacaggactcctctt

SEQ ID NO: 67995 - DNA, 22 bp, synthetic construct
  misc_feature 1..22: note = chemically synthesized
  source 1..22: mol_type = other DNA
ctcttatttaactggcatttgg

SEQ ID NO: 67996 - DNA, 22 bp, synthetic construct
  misc_feature 1..22: note = chemically synthesized
  source 1..22: mol_type = other DNA
ttatttaactggcatttggtag

SEQ ID NO: 67997 - DNA, 22 bp, synthetic construct
  misc_feature 1..22: note = chemically synthesized
  source 1..22: mol_type = other DNA
atttaactggcatttggtagga

SEQ ID NO: 67998 - DNA, 22 bp, synthetic construct
  misc_feature 1..22: note = chemically synthesized
  source 1..22: mol_type = other DNA
tttaactggcatttggtaggag

SEQ ID NO: 67999 - DNA, 22 bp, synthetic construct
  misc_feature 1..22: note = chemically synthesized
  source 1..22: mol_type = other DNA
aactggcatttggtaggagaac

SEQ ID NO: 68000 - DNA, 22 bp, synthetic construct
  misc_feature 1..22: note = chemically synthesized
  source 1..22: mol_type = other DNA
actggcatttggtaggagaaca

SEQ ID NO: 68001 - DNA, 22 bp, synthetic construct
  misc_feature 1..22: note = chemically synthesized
  source 1..22: mol_type = other DNA
gcatttggtaggagaacagggg

SEQ ID NO: 68002 - DNA, 22 bp, synthetic construct
  misc_feature 1..22: note = chemically synthesized
  source 1..22: mol_type = other DNA
ggtaggagaacaggggcagagt

SEQ ID NO: 68003 - DNA, 22 bp, synthetic construct
  misc_feature 1..22: note = chemically synthesized
  source 1..22: mol_type = other DNA
gtaggagaacaggggcagagtc

SEQ ID NO: 68004 - DNA, 22 bp, synthetic construct
  misc_feature 1..22: note = chemically synthesized
  source 1..22: mol_type = other DNA
gctttctggagagcccagggca

SEQ ID NO: 68005 - DNA, 22 bp, synthetic construct
  misc_feature 1..22: note = chemically synthesized
  source 1..22: mol_type = other DNA
tctggagagcccagggcaggga

SEQ ID NO: 68006 - DNA, 22 bp, synthetic construct
  misc_feature 1..22: note = chemically synthesized
  source 1..22: mol_type = other DNA
ctggagagcccagggcagggaa

SEQ ID NO: 68007 - DNA, 22 bp, synthetic construct
  misc_feature 1..22: note = chemically synthesized
  source 1..22: mol_type = other DNA
tggagagcccagggcagggaag

SEQ ID NO: 68008 - DNA, 22 bp, synthetic construct
  misc_feature 1..22: note = chemically synthesized
  source 1..22: mol_type = other DNA
gagagcccagggcagggaagga

SEQ ID NO: 68009 - DNA, 22 bp, synthetic construct
  misc_feature 1..22: note = chemically synthesized
  source 1..22: mol_type = other DNA
agggcggtcaccttagacacca

SEQ ID NO: 68010 - DNA, 22 bp, synthetic construct
  misc_feature 1..22: note = chemically synthesized
  source 1..22: mol_type = other DNA
agacaccatcgttttactttga

SEQ ID NO: 68011 - DNA, 22 bp, synthetic construct
  misc_feature 1..22: note = chemically synthesized
  source 1..22: mol_type = other DNA
gacaccatcgttttactttgaa

SEQ ID NO: 68012 - DNA, 22 bp, synthetic construct
  misc_feature 1..22: note = chemically synthesized
  source 1..22: mol_type = other DNA
tactttgaagaattgtctgtca

SEQ ID NO: 68013 - DNA, 22 bp, synthetic construct
  misc_feature 1..22: note = chemically synthesized
  source 1..22: mol_type = other DNA
actttgaagaattgtctgtcac

SEQ ID NO: 68014 - DNA, 22 bp, synthetic construct
  misc_feature 1..22: note = chemically synthesized
  source 1..22: mol_type = other DNA
ctttgaagaattgtctgtcaca

SEQ ID NO: 68015 - DNA, 22 bp, synthetic construct
  misc_feature 1..22: note = chemically synthesized
  source 1..22: mol_type = other DNA
tgaagaattgtctgtcacacac

SEQ ID NO: 68016 - DNA, 22 bp, synthetic construct
  misc_feature 1..22: note = chemically synthesized
  source 1..22: mol_type = other DNA
gaagaattgtctgtcacacacg

SEQ ID NO: 68017 - DNA, 22 bp, synthetic construct
  misc_feature 1..22: note = chemically synthesized
  source 1..22: mol_type = other DNA
aagaattgtctgtcacacacga

SEQ ID NO: 68018 - DNA, 22 bp, synthetic construct
  misc_feature 1..22: note = chemically synthesized
  source 1..22: mol_type = other DNA
tctgtcacacacgagttgacag

SEQ ID NO: 68019 - DNA, 22 bp, synthetic construct
  misc_feature 1..22: note = chemically synthesized
  source 1..22: mol_type = other DNA
tcacacacgagttgacagtcag

SEQ ID NO: 68020 - DNA, 22 bp, synthetic construct
  misc_feature 1..22: note = chemically synthesized
  source 1..22: mol_type = other DNA
acagtcaggatgggagagaccc

SEQ ID NO: 68021 - DNA, 22 bp, synthetic construct
  misc_feature 1..22: note = chemically synthesized
  source 1..22: mol_type = other DNA
aaactagcataacctcccagag

SEQ ID NO: 68022 - DNA, 22 bp, synthetic construct
  misc_feature 1..22: note = chemically synthesized
  source 1..22: mol_type = other DNA
gcataacctcccagagggaatt

SEQ ID NO: 68023 - DNA, 22 bp, synthetic construct
  misc_feature 1..22: note = chemically synthesized
  source 1..22: mol_type = other DNA
ccagagggaattcctgggctcc

SEQ ID NO: 68024 - DNA, 22 bp, synthetic construct
  misc_feature 1..22: note = chemically synthesized
  source 1..22: mol_type = other DNA
ctgggctcccctgggaatcaac

SEQ ID NO: 68025 - DNA, 22 bp, synthetic construct
  misc_feature 1..22: note = chemically synthesized
  source 1..22: mol_type = other DNA
ggctcccctgggaatcaacagg

SEQ ID NO: 68026 - DNA, 22 bp, synthetic construct
  misc_feature 1..22: note = chemically synthesized
  source 1..22: mol_type = other DNA
ccctgggaatcaacagggatca

SEQ ID NO: 68027 - DNA, 22 bp, synthetic construct
  misc_feature 1..22: note = chemically synthesized
  source 1..22: mol_type = other DNA
ggaatcaacagggatcagtcaa

SEQ ID NO: 68028 - DNA, 22 bp, synthetic construct
  misc_feature 1..22: note = chemically synthesized
  source 1..22: mol_type = other DNA
attatgaggaagacaaatatat

SEQ ID NO: 68029 - DNA, 22 bp, synthetic construct
  misc_feature 1..22: note = chemically synthesized
  source 1..22: mol_type = other DNA
tgaggaagacaaatatatgtca

SEQ ID NO: 68030 - DNA, 22 bp, synthetic construct
  misc_feature 1..22: note = chemically synthesized
  source 1..22: mol_type = other DNA
agcttcactgtatcttccagag

SEQ ID NO: 68031 - DNA, 22 bp, synthetic construct
  misc_feature 1..22: note = chemically synthesized
  source 1..22: mol_type = other DNA
cactgtatcttccagagtttta

SEQ ID NO: 68032 - DNA, 22 bp, synthetic construct
  misc_feature 1..22: note = chemically synthesized
  source 1..22: mol_type = other DNA
actgtatcttccagagttttaa

SEQ ID NO: 68033 - DNA, 22 bp, synthetic construct
  misc_feature 1..22: note = chemically synthesized
  source 1..22: mol_type = other DNA
tatcttccagagttttaaaaaa

SEQ ID NO: 68034 - DNA, 22 bp, synthetic construct
  misc_feature 1..22: note = chemically synthesized
  source 1..22: mol_type = other DNA
ccagagttttaaaaaaatgtat

SEQ ID NO: 68035 - DNA, 22 bp, synthetic construct
  misc_feature 1..22: note = chemically synthesized
  source 1..22: mol_type = other DNA
cagagttttaaaaaaatgtatt

SEQ ID NO: 68036 - DNA, 22 bp, synthetic construct
  misc_feature 1..22: note = chemically synthesized
  source 1..22: mol_type = other DNA
taaaaaaatgtattcactgtcc

SEQ ID NO: 68037 - DNA, 22 bp, synthetic construct
  misc_feature 1..22: note = chemically synthesized
  source 1..22: mol_type = other DNA
aaaaaaatgtattcactgtcca

SEQ ID NO: 68038 - DNA, 22 bp, synthetic construct
  misc_feature 1..22: note = chemically synthesized
  source 1..22: mol_type = other DNA
aaaaaatgtattcactgtccaa

SEQ ID NO: 68039 - DNA, 22 bp, synthetic construct
  misc_feature 1..22: note = chemically synthesized
  source 1..22: mol_type = other DNA
actgtccaacgtgatcctccag

SEQ ID NO: 68040 - DNA, 22 bp, synthetic construct
  misc_feature 1..22: note = chemically synthesized
  source 1..22: mol_type = other DNA
tccaacgtgatcctccagacag

SEQ ID NO: 68041 - DNA, 22 bp, synthetic construct
  misc_feature 1..22: note = chemically synthesized
  source 1..22: mol_type = other DNA
cagacaggttctgcaggacgca

SEQ ID NO: 68042 - DNA, 22 bp, synthetic construct
  misc_feature 1..22: note = chemically synthesized
  source 1..22: mol_type = other DNA
tgcaggacgcagcctaggactc

SEQ ID NO: 68043 - DNA, 22 bp, synthetic construct
  misc_feature 1..22: note = chemically synthesized
  source 1..22: mol_type = other DNA
caggacgcagcctaggactcat

SEQ ID NO: 68044 - DNA, 22 bp, synthetic construct
  misc_feature 1..22: note = chemically synthesized
  source 1..22: mol_type = other DNA
ggactcattatccccaaagtac

SEQ ID NO: 68045 - DNA, 22 bp, synthetic construct
  misc_feature 1..22: note = chemically synthesized
  source 1..22: mol_type = other DNA
attatccccaaagtacacatgg

SEQ ID NO: 68046 - DNA, 22 bp, synthetic construct
  misc_feature 1..22: note = chemically synthesized
  source 1..22: mol_type = other DNA
tccccaaagtacacatggggaa

SEQ ID NO: 68047 - DNA, 22 bp, synthetic construct
  misc_feature 1..22: note = chemically synthesized
  source 1..22: mol_type = other DNA
aggcccagcaggtcaaatgctc

SEQ ID NO: 68048 - DNA, 22 bp, synthetic construct
  misc_feature 1..22: note = chemically synthesized
  source 1..22: mol_type = other DNA
tgtccagtgtgggcctggaagg

SEQ ID NO: 68049 - DNA, 22 bp, synthetic construct
  misc_feature 1..22: note = chemically synthesized
  source 1..22: mol_type = other DNA
tccagtgtgggcctggaaggca

SEQ ID NO: 68050 - DNA, 22 bp, synthetic construct
  misc_feature 1..22: note = chemically synthesized
  source 1..22: mol_type = other DNA
gaaggcaggtcttctccactgt

SEQ ID NO: 68051 - DNA, 22 bp, synthetic construct
  misc_feature 1..22: note = chemically synthesized
  source 1..22: mol_type = other DNA
ctccactgttaggcctggctgt

SEQ ID NO: 68052 - DNA, 22 bp, synthetic construct
  misc_feature 1..22: note = chemically synthesized
  source 1..22: mol_type = other DNA
tccactgttaggcctggctgtc

SEQ ID NO: 68053 - DNA, 22 bp, synthetic construct
  misc_feature 1..22: note = chemically synthesized
  source 1..22: mol_type = other DNA
cactgttaggcctggctgtccc

SEQ ID NO: 68054 - DNA, 22 bp, synthetic construct
  misc_feature 1..22: note = chemically synthesized
  source 1..22: mol_type = other DNA
ttaggcctggctgtccccaaca

SEQ ID NO: 68055 - DNA, 22 bp, synthetic construct
  misc_feature 1..22: note = chemically synthesized
  source 1..22: mol_type = other DNA
ggcctggctgtccccaacagca

SEQ ID NO: 68056 - DNA, 22 bp, synthetic construct
  misc_feature 1..22: note = chemically synthesized
  source 1..22: mol_type = other DNA
gctgtccccaacagcacatact

SEQ ID NO: 68057 - DNA, 22 bp, synthetic construct
  misc_feature 1..22: note = chemically synthesized
  source 1..22: mol_type = other DNA
tccccaacagcacatacttcct

SEQ ID NO: 68058 - DNA, 22 bp, synthetic construct
  misc_feature 1..22: note = chemically synthesized
  source 1..22: mol_type = other DNA
cctcagtccatatgggatcacg

SEQ ID NO: 68059 - DNA, 22 bp, synthetic construct
  misc_feature 1..22: note = chemically synthesized
  source 1..22: mol_type = other DNA
ctcagtccatatgggatcacga

SEQ ID NO: 68060 - DNA, 22 bp, synthetic construct
  misc_feature 1..22: note = chemically synthesized
  source 1..22: mol_type = other DNA
agtccatatgggatcacgataa

SEQ ID NO: 68061 - DNA, 22 bp, synthetic construct
  misc_feature 1..22: note = chemically synthesized
  source 1..22: mol_type = other DNA
catcctccaggaccacactgca

SEQ ID NO: 68062 - DNA, 22 bp, synthetic construct
  misc_feature 1..22: note = chemically synthesized
  source 1..22: mol_type = other DNA
caggaccacactgcatcaacct

SEQ ID NO: 68063 - DNA, 22 bp, synthetic construct
  misc_feature 1..22: note = chemically synthesized
  source 1..22: mol_type = other DNA
catcaacctgctgtgccctaac

SEQ ID NO: 68064 - DNA, 22 bp, synthetic construct
  misc_feature 1..22: note = chemically synthesized
  source 1..22: mol_type = other DNA
ctgtgccctaacatcagctgaa

SEQ ID NO: 68065 - DNA, 22 bp, synthetic construct
  misc_feature 1..22: note = chemically synthesized
  source 1..22: mol_type = other DNA
tgccctaacatcagctgaaggc

SEQ ID NO: 68066 - DNA, 22 bp, synthetic construct
  misc_feature 1..22: note = chemically synthesized
  source 1..22: mol_type = other DNA
acatcagctgaaggccaagctg

SEQ ID NO: 68067 - DNA, 22 bp, synthetic construct
  misc_feature 1..22: note = chemically synthesized
  source 1..22: mol_type = other DNA
aaggccaagctgcggggcaccc

SEQ ID NO: 68068 - DNA, 22 bp, synthetic construct
  misc_feature 1..22: note = chemically synthesized
  source 1..22: mol_type = other DNA
cggggcaccctgggtgttccaa

SEQ ID NO: 68069 - DNA, 22 bp, synthetic construct
  misc_feature 1..22: note = chemically synthesized
  source 1..22: mol_type = other DNA
ggtgttccaagtcactttccct

SEQ ID NO: 68070 - DNA, 22 bp, synthetic construct
  misc_feature 1..22: note = chemically synthesized
  source 1..22: mol_type = other DNA
caagtcactttccctctgcagg

SEQ ID NO: 68071 - DNA, 22 bp, synthetic construct
  misc_feature 1..22: note = chemically synthesized
  source 1..22: mol_type = other DNA
tccctctgcaggcaggaacctc

SEQ ID NO: 68072 - DNA, 22 bp, synthetic construct
  misc_feature 1..22: note = chemically synthesized
  source 1..22: mol_type = other DNA
ccctctgcaggcaggaacctca

SEQ ID NO: 68073 - DNA, 22 bp, synthetic construct
  misc_feature 1..22: note = chemically synthesized
  source 1..22: mol_type = other DNA
cctctgcaggcaggaacctcat

SEQ ID NO: 68074 - DNA, 22 bp, synthetic construct
  misc_feature 1..22: note = chemically synthesized
  source 1..22: mol_type = other DNA
tgcaggcaggaacctcatcctg

SEQ ID NO: 68075 - DNA, 22 bp, synthetic construct
  misc_feature 1..22: note = chemically synthesized
  source 1..22: mol_type = other DNA
caggcaggaacctcatcctgct

SEQ ID NO: 68076 - DNA, 22 bp, synthetic construct
  misc_feature 1..22: note = chemically synthesized
  source 1..22: mol_type = other DNA
atcctgctctgaaacagatgag

SEQ ID NO: 68077 - DNA, 22 bp, synthetic construct
  misc_feature 1..22: note = chemically synthesized
  source 1..22: mol_type = other DNA
ctctgaaacagatgagagggaa

SEQ ID NO: 68078 - DNA, 22 bp, synthetic construct
  misc_feature 1..22: note = chemically synthesized
  source 1..22: mol_type = other DNA
tgaaacagatgagagggaaacg

SEQ ID NO: 68079 - DNA, 22 bp, synthetic construct
  misc_feature 1..22: note = chemically synthesized
  source 1..22: mol_type = other DNA
aaacagatgagagggaaacgca

SEQ ID NO: 68080 - DNA, 22 bp, synthetic construct
  misc_feature 1..22: note = chemically synthesized
  source 1..22: mol_type = other DNA
ccagctcagccaggaaccttag

SEQ ID NO: 68081 - DNA, 22 bp, synthetic construct
  misc_feature 1..22: note = chemically synthesized
  source 1..22: mol_type = other DNA
cagctcagccaggaaccttaga

SEQ ID NO: 68082 - DNA, 22 bp, synthetic construct
  misc_feature 1..22: note = chemically synthesized
  source 1..22: mol_type = other DNA
agccaggaaccttagagtcctg

SEQ ID NO: 68083 - DNA, 22 bp, synthetic construct
  misc_feature 1..22: note = chemically synthesized
  source 1..22: mol_type = other DNA
agagtcctgaccttttacctcg

SEQ ID NO: 68084 - DNA, 22 bp, synthetic construct
  misc_feature 1..22: note = chemically synthesized
  source 1..22: mol_type = other DNA
gagtcctgaccttttacctcgc

SEQ ID NO: 68085 - DNA, 22 bp, synthetic construct
  misc_feature 1..22: note = chemically synthesized
  source 1..22: mol_type = other DNA
accttttacctcgcctaggagt

SEQ ID NO: 68086 - DNA, 22 bp, synthetic construct
  misc_feature 1..22: note = chemically synthesized
  source 1..22: mol_type = other DNA
ttacctcgcctaggagtttgca

SEQ ID NO: 68087 - DNA, 22 bp, synthetic construct
  misc_feature 1..22: note = chemically synthesized
  source 1..22: mol_type = other DNA
tacctcgcctaggagtttgcag

SEQ ID NO: 68088 - DNA, 22 bp, synthetic construct
  misc_feature 1..22: note = chemically synthesized
  source 1..22: mol_type = other DNA
acctcgcctaggagtttgcagg

SEQ ID NO: 68089 - DNA, 22 bp, synthetic construct
  misc_feature 1..22: note = chemically synthesized
  source 1..22: mol_type = other DNA
cctcgcctaggagtttgcaggg

SEQ ID NO: 68090 - DNA, 22 bp, synthetic construct
  misc_feature 1..22: note = chemically synthesized
  source 1..22: mol_type = other DNA
gcctaggagtttgcaggggaga

SEQ ID NO: 68091 - DNA, 22 bp, synthetic construct
  misc_feature 1..22: note = chemically synthesized
  source 1..22: mol_type = other DNA
ggagtttgcaggggagagaaca

SEQ ID NO: 68092 - DNA, 22 bp, synthetic construct
  misc_feature 1..22: note = chemically synthesized
  source 1..22: mol_type = other DNA
gcaggggagagaacacacgaat

SEQ ID NO: 68093 - DNA, 22 bp, synthetic construct
  misc_feature 1..22: note = chemically synthesized
  source 1..22: mol_type = other DNA
caggggagagaacacacgaatt

SEQ ID NO: 68094 - DNA, 22 bp, synthetic construct
  misc_feature 1..22: note = chemically synthesized
  source 1..22: mol_type = other DNA
cggattttaagcctaaataaag

SEQ ID NO: 68095 - DNA, 22 bp, synthetic construct
  misc_feature 1..22: note = chemically synthesized
  source 1..22: mol_type = other DNA
ggattttaagcctaaataaagg

SEQ ID NO: 68096 - DNA, 22 bp, synthetic construct
  misc_feature 1..22: note = chemically synthesized
  source 1..22: mol_type = other DNA
taagcctaaataaaggaagcct

SEQ ID NO: 68097 - DNA, 22 bp, synthetic construct
  misc_feature 1..22: note = chemically synthesized
  source 1..22: mol_type = other DNA
aagcctaaataaaggaagcctt

SEQ ID NO: 68098 - DNA, 22 bp, synthetic construct
  misc_feature 1..22: note = chemically synthesized
  source 1..22: mol_type = other DNA
agcctaaataaaggaagcctta

SEQ ID NO: 68099 - DNA, 22 bp, synthetic construct
  misc_feature 1..22: note = chemically synthesized
  source 1..22: mol_type = other DNA
aataaaggaagccttagtttga

SEQ ID NO: 68100 - DNA, 22 bp, synthetic construct
  misc_feature 1..22: note = chemically synthesized
  source 1..22: mol_type = other DNA
agtttgaagtgcaagctctgcc

SEQ ID NO: 68101 - DNA, 22 bp, synthetic construct
  misc_feature 1..22: note = chemically synthesized
  source 1..22: mol_type = other DNA
gtttgaagtgcaagctctgccg

SEQ ID NO: 68102 - DNA, 22 bp, synthetic construct
  misc_feature 1..22: note = chemically synthesized
  source 1..22: mol_type = other DNA
gaagtgcaagctctgccggaca

SEQ ID NO: 68103 - DNA, 22 bp, synthetic construct
  misc_feature 1..22: note = chemically synthesized
  source 1..22: mol_type = other DNA
aagtgcaagctctgccggacag

SEQ ID NO: 68104 - DNA, 22 bp, synthetic construct
  misc_feature 1..22: note = chemically synthesized
  source 1..22: mol_type = other DNA
tgccggacagggggcaccctgt

SEQ ID NO: 68105 - DNA, 22 bp, synthetic construct
  misc_feature 1..22: note = chemically synthesized
  source 1..22: mol_type = other DNA
ccggacagggggcaccctgtga

SEQ ID NO: 68106 - DNA, 22 bp, synthetic construct
  misc_feature 1..22: note = chemically synthesized
  source 1..22: mol_type = other DNA
tgagccccatttgttaagagga

SEQ ID NO: 68107 - DNA, 22 bp, synthetic construct
  misc_feature 1..22: note = chemically synthesized
  source 1..22: mol_type = other DNA
gttaagaggacaatagtcagag

SEQ ID NO: 68108 - DNA, 22 bp, synthetic construct
  misc_feature 1..22: note = chemically synthesized
  source 1..22: mol_type = other DNA
ttaagaggacaatagtcagaga

SEQ ID NO: 68109 - DNA, 22 bp, synthetic construct
  misc_feature 1..22: note = chemically synthesized
  source 1..22: mol_type = other DNA
agaggacaatagtcagagagct

SEQ ID NO: 68110 - DNA, 22 bp, synthetic construct
  misc_feature 1..22: note = chemically synthesized
  source 1..22: mol_type = other DNA
ccaggctctcacaccagaaaca

SEQ ID NO: 68111 - DNA, 22 bp, synthetic construct
  misc_feature 1..22: note = chemically synthesized
  source 1..22: mol_type = other DNA
caggctctcacaccagaaacag

SEQ ID NO: 68112 - DNA, 22 bp, synthetic construct
  misc_feature 1..22: note = chemically synthesized
  source 1..22: mol_type = other DNA
tcacaccagaaacaggaaatac

SEQ ID NO: 68113 - DNA, 22 bp, synthetic construct
  misc_feature 1..22: note = chemically synthesized
  source 1..22: mol_type = other DNA
acaccagaaacaggaaatacag

SEQ ID NO: 68114 - DNA, 22 bp, synthetic construct
  misc_feature 1..22: note = chemically synthesized
  source 1..22: mol_type = other DNA
cacactgatctccttcccagga

SEQ ID NO: 68115 - DNA, 22 bp, synthetic construct
  misc_feature 1..22: note = chemically synthesized
  source 1..22: mol_type = other DNA
acactgatctccttcccaggag

SEQ ID NO: 68116 - DNA, 22 bp, synthetic construct
  misc_feature 1..22: note = chemically synthesized
  source 1..22: mol_type = other DNA
atctccttcccaggagcaactt

SEQ ID NO: 68117 - DNA, 22 bp, synthetic construct
  misc_feature 1..22: note = chemically synthesized
  source 1..22: mol_type = other DNA
cttcccaggagcaacttgatcc

SEQ ID NO: 68118 - DNA, 22 bp, synthetic construct
  misc_feature 1..22: note = chemically synthesized
  source 1..22: mol_type = other DNA
cccaggagcaacttgatcctct

SEQ ID NO: 68119 - DNA, 22 bp, synthetic construct
  misc_feature 1..22: note = chemically synthesized
  source 1..22: mol_type = other DNA
ccaggagcaacttgatcctctc

SEQ ID NO: 68120 - DNA, 22 bp, synthetic construct
  misc_feature 1..22: note = chemically synthesized
  source 1..22: mol_type = other DNA
gatcctctccataaatccgagc

SEQ ID NO: 68121 - DNA, 22 bp, synthetic construct
  misc_feature 1..22: note = chemically synthesized
  source 1..22: mol_type = other DNA
atcctctccataaatccgagcg

SEQ ID NO: 68122 - DNA, 22 bp, synthetic construct
  misc_feature 1..22: note = chemically synthesized
  source 1..22: mol_type = other DNA
tccataaatccgagcgggaagc

SEQ ID NO: 68123 - DNA, 22 bp, synthetic construct
  misc_feature 1..22: note = chemically synthesized
  source 1..22: mol_type = other DNA
cataaatccgagcgggaagcat

SEQ ID NO: 68124 - DNA, 22 bp, synthetic construct
  misc_feature 1..22: note = chemically synthesized
  source 1..22: mol_type = other DNA
atccaaacaacaaacaagcaaa

SEQ ID NO: 68125 - DNA, 22 bp, synthetic construct
  misc_feature 1..22: note = chemically synthesized
  source 1..22: mol_type = other DNA
tccaaacaacaaacaagcaaac

SEQ ID NO: 68126 - DNA, 22 bp, synthetic construct
  misc_feature 1..22: note = chemically synthesized
  source 1..22: mol_type = other DNA
tgtatgggggatagagagaatg

SEQ ID NO: 68127 - DNA, 22 bp, synthetic construct
  misc_feature 1..22: note = chemically synthesized
  source 1..22: mol_type = other DNA
gtctatggcagtggggagcagt

SEQ ID NO: 68128 - DNA, 22 bp, synthetic construct
  misc_feature 1..22: note = chemically synthesized
  source 1..22: mol_type = other DNA
tggcagtggggagcagtgaata

SEQ ID NO: 68129 - DNA, 22 bp, synthetic construct
  misc_feature 1..22: note = chemically synthesized
  source 1..22: mol_type = other DNA
ggtggagagggtcagggtgtaa

SEQ ID NO: 68130 - DNA, 22 bp, synthetic construct
  misc_feature 1..22: note = chemically synthesized
  source 1..22: mol_type = other DNA
tccagaggcatgagaaacagtc

SEQ ID NO: 68131 - DNA, 22 bp, synthetic construct
  misc_feature 1..22: note = chemically synthesized
  source 1..22: mol_type = other DNA
ccagaggcatgagaaacagtca

SEQ ID NO: 68132 - DNA, 22 bp, synthetic construct
  misc_feature 1..22: note = chemically synthesized
  source 1..22: mol_type = other DNA
cagaggcatgagaaacagtcag

SEQ ID NO: 68133 - DNA, 22 bp, synthetic construct
  misc_feature 1..22: note = chemically synthesized
  source 1..22: mol_type = other DNA
cacccacagatgacctcaaaca

SEQ ID NO: 68134 - DNA, 22 bp, synthetic construct
  misc_feature 1..22: note = chemically synthesized
  source 1..22: mol_type = other DNA
aaacaccccaagtgctccttga

SEQ ID NO: 68135 - DNA, 22 bp, synthetic construct
  misc_feature 1..22: note = chemically synthesized
  source 1..22: mol_type = other DNA
cttgaaaggctgaggcttttgt

SEQ ID NO: 68136 - DNA, 22 bp, synthetic construct
  misc_feature 1..22: note = chemically synthesized
  source 1..22: mol_type = other DNA
gaaaggctgaggcttttgtgtt

SEQ ID NO: 68137 - DNA, 22 bp, synthetic construct
  misc_feature 1..22: note = chemically synthesized
  source 1..22: mol_type = other DNA
aaaggctgaggcttttgtgttg

SEQ ID NO: 68138 - DNA, 22 bp, synthetic construct
  misc_feature 1..22: note = chemically synthesized
  source 1..22: mol_type = other DNA
aggcttttgtgttgctcttggt

SEQ ID NO: 68139 - DNA, 22 bp, synthetic construct
  misc_feature 1..22: note = chemically synthesized
  source 1..22: mol_type = other DNA
ttgtgttgctcttggttggatt

SEQ ID NO: 68140 - DNA, 22 bp, synthetic construct
  misc_feature 1..22: note = chemically synthesized
  source 1..22: mol_type = other DNA
tgtgttgctcttggttggatta

SEQ ID NO: 68141 - DNA, 22 bp, synthetic construct
  misc_feature 1..22: note = chemically synthesized
  source 1..22: mol_type = other DNA
gtgttgctcttggttggattat

SEQ ID NO: 68142 - DNA, 22 bp, synthetic construct
  misc_feature 1..22: note = chemically synthesized
  source 1..22: mol_type = other DNA
tgttgctcttggttggattatt

SEQ ID NO: 68143 - DNA, 22 bp, synthetic construct
  misc_feature 1..22: note = chemically synthesized
  source 1..22: mol_type = other DNA
ctcttggttggattattcacag

SEQ ID NO: 68144 - DNA, 22 bp, synthetic construct
  misc_feature 1..22: note = chemically synthesized
  source 1..22: mol_type = other DNA
ttggttggattattcacaggca

SEQ ID NO: 68145 - DNA, 22 bp, synthetic construct
  misc_feature 1..22: note = chemically synthesized
  source 1..22: mol_type = other DNA
ggttggattattcacaggcaat

SEQ ID NO: 68146 - DNA, 22 bp, synthetic construct
  misc_feature 1..22: note = chemically synthesized
  source 1..22: mol_type = other DNA
gttggattattcacaggcaatg

SEQ ID NO: 68147 - DNA, 22 bp, synthetic construct
  misc_feature 1..22: note = chemically synthesized
  source 1..22: mol_type = other DNA
gattattcacaggcaatgaagt

SEQ ID NO: 68148 - DNA, 22 bp, synthetic construct
  misc_feature 1..22: note = chemically synthesized
  source 1..22: mol_type = other DNA
ttcacaggcaatgaagtaaaca

SEQ ID NO: 68149 - DNA, 22 bp, synthetic construct
  misc_feature 1..22: note = chemically synthesized
  source 1..22: mol_type = other DNA
acaggcaatgaagtaaacaagg

SEQ ID NO: 68150 - DNA, 22 bp, synthetic construct
  misc_feature 1..22: note = chemically synthesized
  source 1..22: mol_type = other DNA
agaaccagggacagcttccgca

SEQ ID NO: 68151 - DNA, 22 bp, synthetic construct
  misc_feature 1..22: note = chemically synthesized
  source 1..22: mol_type = other DNA
ccgcaggaacctgggtcagttc

SEQ ID NO: 68152 - DNA, 22 bp, synthetic construct
  misc_feature 1..22: note = chemically synthesized
  source 1..22: mol_type = other DNA
cgcaggaacctgggtcagttct

SEQ ID NO: 68153 - DNA, 22 bp, synthetic construct
  misc_feature 1..22: note = chemically synthesized
  source 1..22: mol_type = other DNA
ggtcagttctaaaaggacaaat

SEQ ID NO: 68154 - DNA, 22 bp, synthetic construct
  misc_feature 1..22: note = chemically synthesized
  source 1..22: mol_type = other DNA
taaaaggacaaatggaatgacc

SEQ ID NO: 68155 - DNA, 22 bp, synthetic construct
  misc_feature 1..22: note = chemically synthesized
  source 1..22: mol_type = other DNA
aaaggacaaatggaatgaccct

SEQ ID NO: 68156 - DNA, 22 bp, synthetic construct
  misc_feature 1..22: note = chemically synthesized
  source 1..22: mol_type = other DNA
agtagagaagtcagagaaaggc

SEQ ID NO: 68157 - DNA, 22 bp, synthetic construct
  misc_feature 1..22: note = chemically synthesized
  source 1..22: mol_type = other DNA
tcactgaggcaaactccctccc

SEQ ID NO: 68158 - DNA, 22 bp, synthetic construct
  misc_feature 1..22: note = chemically synthesized
  source 1..22: mol_type = other DNA
actgaggcaaactccctcccca

SEQ ID NO: 68159 - DNA, 22 bp, synthetic construct
  misc_feature 1..22: note = chemically synthesized
  source 1..22: mol_type = other DNA
aggcaaactccctccccagcag

SEQ ID NO: 68160 - DNA, 22 bp, synthetic construct
  misc_feature 1..22: note = chemically synthesized
  source 1..22: mol_type = other DNA
cctccccagcagggacccaggc

SEQ ID NO: 68161 - DNA, 22 bp, synthetic construct
  misc_feature 1..22: note = chemically synthesized
  source 1..22: mol_type = other DNA
cccagcagggacccaggcagca

SEQ ID NO: 68162 - DNA, 22 bp, synthetic construct
  misc_feature 1..22: note = chemically synthesized
  source 1..22: mol_type = other DNA
ggaaaagcaggagtgtcactat

SEQ ID NO: 68163 - DNA, 22 bp, synthetic construct
  misc_feature 1..22: note = chemically synthesized
  source 1..22: mol_type = other DNA
ttgtatcatatgggagagggca

SEQ ID NO: 68164 - DNA, 22 bp, synthetic construct
  misc_feature 1..22: note = chemically synthesized
  source 1..22: mol_type = other DNA
tatcatatgggagagggcaggc

SEQ ID NO: 68165 - DNA, 22 bp, synthetic construct
  misc_feature 1..22: note = chemically synthesized
  source 1..22: mol_type = other DNA
tgtgctctcagggaagttcctc

SEQ ID NO: 68166 - DNA, 22 bp, synthetic construct
  misc_feature 1..22: note = chemically synthesized
  source 1..22: mol_type = other DNA
tcagggaagttcctcaacttct

SEQ ID NO: 68167 - DNA, 22 bp, synthetic construct
  misc_feature 1..22: note = chemically synthesized
  source 1..22: mol_type = other DNA
agggaagttcctcaacttctct

SEQ ID NO: 68168 - DNA, 22 bp, synthetic construct
  misc_feature 1..22: note = chemically synthesized
  source 1..22: mol_type = other DNA
ctcaacttctctgtgccgtagt

SEQ ID NO: 68169 - DNA, 22 bp, synthetic construct
  misc_feature 1..22: note = chemically synthesized
  source 1..22: mol_type = other DNA
aacttctctgtgccgtagtttc

SEQ ID NO: 68170 - DNA, 22 bp, synthetic construct
  misc_feature 1..22: note = chemically synthesized
  source 1..22: mol_type = other DNA
ctctgtgccgtagtttcctcat

SEQ ID NO: 68171 - DNA, 22 bp, synthetic construct
  misc_feature 1..22: note = chemically synthesized
  source 1..22: mol_type = other DNA
tctgtgccgtagtttcctcatc

SEQ ID NO: 68172 - DNA, 22 bp, synthetic construct
  misc_feature 1..22: note = chemically synthesized
  source 1..22: mol_type = other DNA
tgtgccgtagtttcctcatctg

SEQ ID NO: 68173 - DNA, 22 bp, synthetic construct
  misc_feature 1..22: note = chemically synthesized
  source 1..22: mol_type = other DNA
tgccgtagtttcctcatctgca

SEQ ID NO: 68174 - DNA, 22 bp, synthetic construct
  misc_feature 1..22: note = chemically synthesized
  source 1..22: mol_type = other DNA
cctcatctgcaaaatgtaaatc

SEQ ID NO: 68175 - DNA, 22 bp, synthetic construct
  misc_feature 1..22: note = chemically synthesized
  source 1..22: mol_type = other DNA
ctcatctgcaaaatgtaaatca

SEQ ID NO: 68176 - DNA, 22 bp, synthetic construct
  misc_feature 1..22: note = chemically synthesized
  source 1..22: mol_type = other DNA
atctgcaaaatgtaaatcaaat

SEQ ID NO: 68177 - DNA, 22 bp, synthetic construct
  misc_feature 1..22: note = chemically synthesized
  source 1..22: mol_type = other DNA
caaaatgtaaatcaaatttgag

SEQ ID NO: 68178 - DNA, 22 bp, synthetic construct
  misc_feature 1..22: note = chemically synthesized
  source 1..22: mol_type = other DNA
gaggtttcaatgcaatgactta

SEQ ID NO: 68179 - DNA, 22 bp, synthetic construct
  misc_feature 1..22: note = chemically synthesized
  source 1..22: mol_type = other DNA
aggtttcaatgcaatgacttat

SEQ ID NO: 68180 - DNA, 22 bp, synthetic construct
  misc_feature 1..22: note = chemically synthesized
  source 1..22: mol_type = other DNA
caatgcaatgacttatttctct

SEQ ID NO: 68181 - DNA, 22 bp, synthetic construct
  misc_feature 1..22: note = chemically synthesized
  source 1..22: mol_type = other DNA
aatgcaatgacttatttctcta

SEQ ID NO: 68182 - DNA, 22 bp, synthetic construct
  misc_feature 1..22: note = chemically synthesized
  source 1..22: mol_type = other DNA
atttctctaaagttccttgtcc

SEQ ID NO: 68183 - DNA, 22 bp, synthetic construct
  misc_feature 1..22: note = chemically synthesized
  source 1..22: mol_type = other DNA
tttctctaaagttccttgtcct

SEQ ID NO: 68184 - DNA, 22 bp, synthetic construct
  misc_feature 1..22: note = chemically synthesized
  source 1..22: mol_type = other DNA
ctctaaagttccttgtccttgt

SEQ ID NO: 68185 - DNA, 22 bp, synthetic construct
  misc_feature 1..22: note = chemically synthesized
  source 1..22: mol_type = other DNA
tctaaagttccttgtccttgtc

SEQ ID NO: 68186 - DNA, 22 bp, synthetic construct
  misc_feature 1..22: note = chemically synthesized
  source 1..22: mol_type = other DNA
taaagttccttgtccttgtccc

SEQ ID NO: 68187 - DNA, 22 bp, synthetic construct
  misc_feature 1..22: note = chemically synthesized
  source 1..22: mol_type = other DNA
aagttccttgtccttgtcccat

SEQ ID NO: 68188 - DNA, 22 bp, synthetic construct
  misc_feature 1..22: note = chemically synthesized
  source 1..22: mol_type = other DNA
cttgtccttgtcccatgtagcc

SEQ ID NO: 68189 - DNA, 22 bp, synthetic construct
  misc_feature 1..22: note = chemically synthesized
  source 1..22: mol_type = other DNA
gtccttgtcccatgtagcccag

SEQ ID NO: 68190 - DNA, 22 bp, synthetic construct
  misc_feature 1..22: note = chemically synthesized
  source 1..22: mol_type = other DNA
tccttgtcccatgtagcccaga

SEQ ID NO: 68191 - DNA, 22 bp, synthetic construct
  misc_feature 1..22: note = chemically synthesized
  source 1..22: mol_type = other DNA
gtcccatgtagcccagaaatct

SEQ ID NO: 68192 - DNA, 22 bp, synthetic construct
  misc_feature 1..22: note = chemically synthesized
  source 1..22: mol_type = other DNA
tcccatgtagcccagaaatctt

SEQ ID NO: 68193 - DNA, 22 bp, synthetic construct
  misc_feature 1..22: note = chemically synthesized
  source 1..22: mol_type = other DNA
cctctggcctagttgtggagcc

SEQ ID NO: 68194 - DNA, 22 bp, synthetic construct
  misc_feature 1..22: note = chemically synthesized
  source 1..22: mol_type = other DNA
ctctggcctagttgtggagcct

SEQ ID NO: 68195 - DNA, 22 bp, synthetic construct
  misc_feature 1..22: note = chemically synthesized
  source 1..22: mol_type = other DNA
tggcctagttgtggagcctggc

SEQ ID NO: 68196 - DNA, 22 bp, synthetic construct
  misc_feature 1..22: note = chemically synthesized
  source 1..22: mol_type = other DNA
gcctagttgtggagcctggcct

SEQ ID NO: 68197 - DNA, 22 bp, synthetic construct
  misc_feature 1..22: note = chemically synthesized
  source 1..22: mol_type = other DNA
gttgtggagcctggcctaagtc

SEQ ID NO: 68198 - DNA, 22 bp, synthetic construct
  misc_feature 1..22: note = chemically synthesized
  source 1..22: mol_type = other DNA
tggagcctggcctaagtcgcac

SEQ ID NO: 68199 - DNA, 22 bp, synthetic construct
  misc_feature 1..22: note = chemically synthesized
  source 1..22: mol_type = other DNA
gcctaagtcgcacattgctgga

SEQ ID NO: 68200 - DNA, 22 bp, synthetic construct
  misc_feature 1..22: note = chemically synthesized
  source 1..22: mol_type = other DNA
agtcgcacattgctggagatgg

SEQ ID NO: 68201 - DNA, 22 bp, synthetic construct
  misc_feature 1..22: note = chemically synthesized
  source 1..22: mol_type = other DNA
ctggagatggtgaagctgacca

SEQ ID NO: 68202 - DNA, 22 bp, synthetic construct
  misc_feature 1..22: note = chemically synthesized
  source 1..22: mol_type = other DNA
gagatggtgaagctgaccagca

SEQ ID NO: 68203 - DNA, 22 bp, synthetic construct
  misc_feature 1..22: note = chemically synthesized
  source 1..22: mol_type = other DNA
accagcatgagaggtcagtttc

SEQ ID NO: 68204 - DNA, 22 bp, synthetic construct
  misc_feature 1..22: note = chemically synthesized
  source 1..22: mol_type = other DNA
ctagaagcccaaatcccaacag

SEQ ID NO: 68205 - DNA, 22 bp, synthetic construct
  misc_feature 1..22: note = chemically synthesized
  source 1..22: mol_type = other DNA
tagaagcccaaatcccaacagg

SEQ ID NO: 68206 - DNA, 22 bp, synthetic construct
  misc_feature 1..22: note = chemically synthesized
  source 1..22: mol_type = other DNA
gaagcccaaatcccaacaggca

SEQ ID NO: 68207 - DNA, 22 bp, synthetic construct
  misc_feature 1..22: note = chemically synthesized
  source 1..22: mol_type = other DNA
accctccaatatcagctctatc

SEQ ID NO: 68208 - DNA, 22 bp, synthetic construct
  misc_feature 1..22: note = chemically synthesized
  source 1..22: mol_type = other DNA
caatatcagctctatcagaaac

SEQ ID NO: 68209 - DNA, 22 bp, synthetic construct
  misc_feature 1..22: note = chemically synthesized
  source 1..22: mol_type = other DNA
tatcagaaacaaacaaacaaaa

SEQ ID NO: 68210 - DNA, 22 bp, synthetic construct
  misc_feature 1..22: note = chemically synthesized
  source 1..22: mol_type = other DNA
tcagaaacaaacaaacaaaaac

SEQ ID NO: 68211 - DNA, 22 bp, synthetic construct
  misc_feature 1..22: note = chemically synthesized
  source 1..22: mol_type = other DNA
attcatttgtccttttcctcaa

SEQ ID NO: 68212 - DNA, 22 bp, synthetic construct
  misc_feature 1..22: note = chemically synthesized
  source 1..22: mol_type = other DNA
ttcatttgtccttttcctcaaa

SEQ ID NO: 68213 - DNA, 22 bp, synthetic construct
  misc_feature 1..22: note = chemically synthesized
  source 1..22: mol_type = other DNA
atttgtccttttcctcaaatgg

SEQ ID NO: 68214 - DNA, 22 bp, synthetic construct
  misc_feature 1..22: note = chemically synthesized
  source 1..22: mol_type = other DNA
gtccttttcctcaaatgggtgg

SEQ ID NO: 68215 - DNA, 22 bp, synthetic construct
  misc_feature 1..22: note = chemically synthesized
  source 1..22: mol_type = other DNA
tccttttcctcaaatgggtggc

SEQ ID NO: 68216 - DNA, 22 bp, synthetic construct
  misc_feature 1..22: note = chemically synthesized
  source 1..22: mol_type = other DNA
ttcctcaaatgggtggcacttg

SEQ ID NO: 68217 - DNA, 22 bp, synthetic construct
  misc_feature 1..22: note = chemically synthesized
  source 1..22: mol_type = other DNA
tcctcaaatgggtggcacttgg

SEQ ID NO: 68218 - DNA, 22 bp, synthetic construct
  misc_feature 1..22: note = chemically synthesized
  source 1..22: mol_type = other DNA
cctcaaatgggtggcacttggg

SEQ ID NO: 68219 - DNA, 22 bp, synthetic construct
  misc_feature 1..22: note = chemically synthesized
  source 1..22: mol_type = other DNA
ctcaaatgggtggcacttgggc

SEQ ID NO: 68220 - DNA, 22 bp, synthetic construct
  misc_feature 1..22: note = chemically synthesized
  source 1..22: mol_type = other DNA
aaatgggtggcacttgggcagg

SEQ ID NO: 68221 - DNA, 22 bp, synthetic construct
  misc_feature 1..22: note = chemically synthesized
  source 1..22: mol_type = other DNA
gggcagggcagaagggctggtt

SEQ ID NO: 68222 - DNA, 22 bp, synthetic construct
  misc_feature 1..22: note = chemically synthesized
  source 1..22: mol_type = other DNA
ggcagggcagaagggctggtta

SEQ ID NO: 68223 - DNA, 22 bp, synthetic construct
  misc_feature 1..22: note = chemically synthesized
  source 1..22: mol_type = other DNA
gttatccaagcttggaagatgc

SEQ ID NO: 68224 - DNA, 22 bp, synthetic construct
  misc_feature 1..22: note = chemically synthesized
  source 1..22: mol_type = other DNA
tccaagcttggaagatgctgac

SEQ ID NO: 68225 - DNA, 22 bp, synthetic construct
  misc_feature 1..22: note = chemically synthesized
  source 1..22: mol_type = other DNA
ggaagatgctgacagcagacgc

SEQ ID NO: 68226 - DNA, 22 bp, synthetic construct
  misc_feature 1..22: note = chemically synthesized
  source 1..22: mol_type = other DNA
gaagatgctgacagcagacgct

SEQ ID NO: 68227 - DNA, 22 bp, synthetic construct
  misc_feature 1..22: note = chemically synthesized
  source 1..22: mol_type = other DNA
acagcagacgcttcaatggcag

SEQ ID NO: 68228 - DNA, 22 bp, synthetic construct
  misc_feature 1..22: note = chemically synthesized
  source 1..22: mol_type = other DNA
caatggcagtaggagttttctg

SEQ ID NO: 68229 - DNA, 22 bp, synthetic construct
  misc_feature 1..22: note = chemically synthesized
  source 1..22: mol_type = other DNA
aatggcagtaggagttttctga

SEQ ID NO: 68230 - DNA, 22 bp, synthetic construct
  misc_feature 1..22: note = chemically synthesized
  source 1..22: mol_type = other DNA
tctgatcactgtcattggtatc

SEQ ID NO: 68231 - DNA, 22 bp, synthetic construct
  misc_feature 1..22: note = chemically synthesized
  source 1..22: mol_type = other DNA
ctgatcactgtcattggtatca

SEQ ID NO: 68232 - DNA, 22 bp, synthetic construct
  misc_feature 1..22: note = chemically synthesized
  source 1..22: mol_type = other DNA
tgatcactgtcattggtatcac

SEQ ID NO: 68233 - DNA, 22 bp, synthetic construct
  misc_feature 1..22: note = chemically synthesized
  source 1..22: mol_type = other DNA
atcactgtcattggtatcacgc

SEQ ID NO: 68234 - DNA, 22 bp, synthetic construct
  misc_feature 1..22: note = chemically synthesized
  source 1..22: mol_type = other DNA
tcattggtatcacgcttactgt

SEQ ID NO: 68235 - DNA, 22 bp, synthetic construct
  misc_feature 1..22: note = chemically synthesized
  source 1..22: mol_type = other DNA
gtatcacgcttactgttgaaat

SEQ ID NO: 68236 - DNA, 22 bp, synthetic construct
  misc_feature 1..22: note = chemically synthesized
  source 1..22: mol_type = other DNA
actgttgaaatcgtgacatcag

SEQ ID NO: 68237 - DNA, 22 bp, synthetic construct
  misc_feature 1..22: note = chemically synthesized
  source 1..22: mol_type = other DNA
ctgttgaaatcgtgacatcagg

SEQ ID NO: 68238 - DNA, 22 bp, synthetic construct
  misc_feature 1..22: note = chemically synthesized
  source 1..22: mol_type = other DNA
ttgaaatcgtgacatcaggaat

SEQ ID NO: 68239 - DNA, 22 bp, synthetic construct
  misc_feature 1..22: note = chemically synthesized
  source 1..22: mol_type = other DNA
aaatcgtgacatcaggaatgat

SEQ ID NO: 68240 - DNA, 22 bp, synthetic construct
  misc_feature 1..22: note = chemically synthesized
  source 1..22: mol_type = other DNA
gagtcagatggtctggagcggg

SEQ ID NO: 68241 - DNA, 22 bp, synthetic construct
  misc_feature 1..22: note = chemically synthesized
  source 1..22: mol_type = other DNA
gagcggggaagtgaggagctga

SEQ ID NO: 68242 - DNA, 22 bp, synthetic construct
  misc_feature 1..22: note = chemically synthesized
  source 1..22: mol_type = other DNA
aaacctccttcagtctggttgc

SEQ ID NO: 68243 - DNA, 22 bp, synthetic construct
  misc_feature 1..22: note = chemically synthesized
  source 1..22: mol_type = other DNA
cttcagtctggttgctgtgtcc

SEQ ID NO: 68244 - DNA, 22 bp, synthetic construct
  misc_feature 1..22: note = chemically synthesized
  source 1..22: mol_type = other DNA
cagtctggttgctgtgtcccca

SEQ ID NO: 68245 - DNA, 22 bp, synthetic construct
  misc_feature 1..22: note = chemically synthesized
  source 1..22: mol_type = other DNA
agtctggttgctgtgtccccag

SEQ ID NO: 68246 - DNA, 22 bp, synthetic construct
  misc_feature 1..22: note = chemically synthesized
  source 1..22: mol_type = other DNA
gttgctgtgtccccagggtggg

SEQ ID NO: 68247 - DNA, 22 bp, synthetic construct
  misc_feature 1..22: note = chemically synthesized
  source 1..22: mol_type = other DNA
ctgtgtccccagggtgggtaga

SEQ ID NO: 68248 - DNA, 22 bp, synthetic construct
  misc_feature 1..22: note = chemically synthesized
  source 1..22: mol_type = other DNA
tgtccccagggtgggtagatcc

SEQ ID NO: 68249 - DNA, 22 bp, synthetic construct
  misc_feature 1..22: note = chemically synthesized
  source 1..22: mol_type = other DNA
tgttcatcccacatgggacaag

SEQ ID NO: 68250 - DNA, 22 bp, synthetic construct
  misc_feature 1..22: note = chemically synthesized
  source 1..22: mol_type = other DNA
ttcatcccacatgggacaagta

SEQ ID NO: 68251 - DNA, 22 bp, synthetic construct
  misc_feature 1..22: note = chemically synthesized
  source 1..22: mol_type = other DNA
atcccacatgggacaagtagag

SEQ ID NO: 68252 - DNA, 22 bp, synthetic construct
  misc_feature 1..22: note = chemically synthesized
  source 1..22: mol_type = other DNA
tctaaagggttgaagcattgag

SEQ ID NO: 68253 - DNA, 22 bp, synthetic construct
  misc_feature 1..22: note = chemically synthesized
  source 1..22: mol_type = other DNA
ctaaagggttgaagcattgagc

SEQ ID NO: 68254 - DNA, 22 bp, synthetic construct
  misc_feature 1..22: note = chemically synthesized
  source 1..22: mol_type = other DNA
taaagggttgaagcattgagct

SEQ ID NO: 68255 - DNA, 22 bp, synthetic construct
  misc_feature 1..22: note = chemically synthesized
  source 1..22: mol_type = other DNA
aagggttgaagcattgagctgt

SEQ ID NO: 68256 - DNA, 22 bp, synthetic construct
  misc_feature 1..22: note = chemically synthesized
  source 1..22: mol_type = other DNA
aagcattgagctgtgagcttct

SEQ ID NO: 68257 - DNA, 22 bp, synthetic construct
  misc_feature 1..22: note = chemically synthesized
  source 1..22: mol_type = other DNA
agctgtgagcttctcggttgct

SEQ ID NO: 68258 - DNA, 22 bp, synthetic construct
  misc_feature 1..22: note = chemically synthesized
  source 1..22: mol_type = other DNA
tgagcttctcggttgctgcagc

SEQ ID NO: 68259 - DNA, 22 bp, synthetic construct
  misc_feature 1..22: note = chemically synthesized
  source 1..22: mol_type = other DNA
ctcggttgctgcagcacaatcc

SEQ ID NO: 68260 - DNA, 22 bp, synthetic construct
  misc_feature 1..22: note = chemically synthesized
  source 1..22: mol_type = other DNA
tcggttgctgcagcacaatcct

SEQ ID NO: 68261 - DNA, 22 bp, synthetic construct
  misc_feature 1..22: note = chemically synthesized
  source 1..22: mol_type = other DNA
ggttgctgcagcacaatccttg

SEQ ID NO: 68262 - DNA, 22 bp, synthetic construct
  misc_feature 1..22: note = chemically synthesized
  source 1..22: mol_type = other DNA
ctgcagcacaatccttgcccat

SEQ ID NO: 68263 - DNA, 22 bp, synthetic construct
  misc_feature 1..22: note = chemically synthesized
  source 1..22: mol_type = other DNA
cagcacaatccttgcccatcct

SEQ ID NO: 68264 - DNA, 22 bp, synthetic construct
  misc_feature 1..22: note = chemically synthesized
  source 1..22: mol_type = other DNA
gcccatcctgactgaaacaacc

SEQ ID NO: 68265 - DNA, 22 bp, synthetic construct
  misc_feature 1..22: note = chemically synthesized
  source 1..22: mol_type = other DNA
cccatcctgactgaaacaacca

SEQ ID NO: 68266 - DNA, 22 bp, synthetic construct
  misc_feature 1..22: note = chemically synthesized
  source 1..22: mol_type = other DNA
actgaaacaaccagaattcatg

SEQ ID NO: 68267 - DNA, 22 bp, synthetic construct
  misc_feature 1..22: note = chemically synthesized
  source 1..22: mol_type = other DNA
aaacaaccagaattcatgaaat

SEQ ID NO: 68268 - DNA, 22 bp, synthetic construct
  misc_feature 1..22: note = chemically synthesized
  source 1..22: mol_type = other DNA
atgaaatgcatcaaagaagtct

SEQ ID NO: 68269 - DNA, 22 bp, synthetic construct
  misc_feature 1..22: note = chemically synthesized
  source 1..22: mol_type = other DNA
cacctactacgcaagcctggaa

SEQ ID NO: 68270 - DNA, 22 bp, synthetic construct
  misc_feature 1..22: note = chemically synthesized
  source 1..22: mol_type = other DNA
acctactacgcaagcctggaag

SEQ ID NO: 68271 - DNA, 22 bp, synthetic construct
  misc_feature 1..22: note = chemically synthesized
  source 1..22: mol_type = other DNA
ctacgcaagcctggaagggtga

SEQ ID NO: 68272 - DNA, 22 bp, synthetic construct
  misc_feature 1..22: note = chemically synthesized
  source 1..22: mol_type = other DNA
cgcaagcctggaagggtgacta

SEQ ID NO: 68273 - DNA, 22 bp, synthetic construct
  misc_feature 1..22: note = chemically synthesized
  source 1..22: mol_type = other DNA
gaagggtgactaagatctgaaa

SEQ ID NO: 68274 - DNA, 22 bp, synthetic construct
  misc_feature 1..22: note = chemically synthesized
  source 1..22: mol_type = other DNA
agatctgaaaaacaccgggaag

SEQ ID NO: 68275 - DNA, 22 bp, synthetic construct
  misc_feature 1..22: note = chemically synthesized
  source 1..22: mol_type = other DNA
aaaaacaccgggaaggctaaag

SEQ ID NO: 68276 - DNA, 22 bp, synthetic construct
  misc_feature 1..22: note = chemically synthesized
  source 1..22: mol_type = other DNA
aaggaactcccacaaggaaacc

SEQ ID NO: 68277 - DNA, 22 bp, synthetic construct
  misc_feature 1..22: note = chemically synthesized
  source 1..22: mol_type = other DNA
ccacaaggaaaccccattagaa

SEQ ID NO: 68278 - DNA, 22 bp, synthetic construct
  misc_feature 1..22: note = chemically synthesized
  source 1..22: mol_type = other DNA
gaaagttctagttacaagatgc

SEQ ID NO: 68279 - DNA, 22 bp, synthetic construct
  misc_feature 1..22: note = chemically synthesized
  source 1..22: mol_type = other DNA
tagttacaagatgctcagcaca

SEQ ID NO: 68280 - DNA, 22 bp, synthetic construct
  misc_feature 1..22: note = chemically synthesized
  source 1..22: mol_type = other DNA
gttacaagatgctcagcacagg

SEQ ID NO: 68281 - DNA, 22 bp, synthetic construct
  misc_feature 1..22: note = chemically synthesized
  source 1..22: mol_type = other DNA
caagatgctcagcacaggccat

SEQ ID NO: 68282 - DNA, 22 bp, synthetic construct
  misc_feature 1..22: note = chemically synthesized
  source 1..22: mol_type = other DNA
agcacaggccatgcagaaatac

SEQ ID NO: 68283 - DNA, 22 bp, synthetic construct
  misc_feature 1..22: note = chemically synthesized
  source 1..22: mol_type = other DNA
agtcacgcaggagagactcata

SEQ ID NO: 68284 - DNA, 22 bp, synthetic construct
  misc_feature 1..22: note = chemically synthesized
  source 1..22: mol_type = other DNA
ataggggctcaagccagcaagg

SEQ ID NO: 68285 - DNA, 22 bp, synthetic construct
  misc_feature 1..22: note = chemically synthesized
  source 1..22: mol_type = other DNA
aagccagcaaggggacggcctc

SEQ ID NO: 68286 - DNA, 22 bp, synthetic construct
  misc_feature 1..22: note = chemically synthesized
  source 1..22: mol_type = other DNA
caccccacgcactgttggccaa

SEQ ID NO: 68287 - DNA, 22 bp, synthetic construct
  misc_feature 1..22: note = chemically synthesized
  source 1..22: mol_type = other DNA
ttggccaacagcttccaggggc

SEQ ID NO: 68288 - DNA, 22 bp, synthetic construct
  misc_feature 1..22: note = chemically synthesized
  source 1..22: mol_type = other DNA
gccaacagcttccaggggcatt

SEQ ID NO: 68289 - DNA, 22 bp, synthetic construct
  misc_feature 1..22: note = chemically synthesized
  source 1..22: mol_type = other DNA
ccaggggcatttgctctcagaa

SEQ ID NO: 68290 - DNA, 22 bp, synthetic construct
  misc_feature 1..22: note = chemically synthesized
  source 1..22: mol_type = other DNA
caggggcatttgctctcagaag

SEQ ID NO: 68291 - DNA, 22 bp, synthetic construct
  misc_feature 1..22: note = chemically synthesized
  source 1..22: mol_type = other DNA
gctctcagaagtcaaagctgat

SEQ ID NO: 68292 - DNA, 22 bp, synthetic construct
  misc_feature 1..22: note = chemically synthesized
  source 1..22: mol_type = other DNA
ctctcagaagtcaaagctgatt

SEQ ID NO: 68293 - DNA, 22 bp, synthetic construct
  misc_feature 1..22: note = chemically synthesized
  source 1..22: mol_type = other DNA
tcagaagtcaaagctgattttc

SEQ ID NO: 68294 - DNA, 22 bp, synthetic construct
  misc_feature 1..22: note = chemically synthesized
  source 1..22: mol_type = other DNA
agaagtcaaagctgattttcca

SEQ ID NO: 68295 - DNA, 22 bp, synthetic construct
  misc_feature 1..22: note = chemically synthesized
  source 1..22: mol_type = other DNA
attttccacaattgaagtgctc

SEQ ID NO: 68296 - DNA, 22 bp, synthetic construct
  misc_feature 1..22: note = chemically synthesized
  source 1..22: mol_type = other DNA
tccacaattgaagtgctcactg

SEQ ID NO: 68297 - DNA, 22 bp, synthetic construct
  misc_feature 1..22: note = chemically synthesized
  source 1..22: mol_type = other DNA
ccacaattgaagtgctcactgt

SEQ ID NO: 68298 - skipped

SEQ ID NO: 68299 - protein, 9 aa, synthetic construct
  REGION 1..9: note = chemically synthesized
LAGLIDADG
